United States Patent Application Publication US 2017/0071208 A1 - sequence listing, part 2

SEQ ID NO: 1576 - DNA, 1991 bp, Aedes aegypti
ttgagcttttaccatttggtgcctttgttttactgaataagcttacaaagcaacataattaagtgttttagataatttttgtcaatattttggatcgcatcttgaatcccatacgaaatgaatacggaaaatgcaggagcacccaacagccgtttggcatcctacaaacatggagtcaaaagcaatgcggaactccgccaacgtcgtcacgaggttactgtcgaactgcgcaagaacaaaaaggaagaccagctcttcaaacgtcggaacatcaccagcgaggaaccaaccgtcacctccccactgcaggaaagcaatgcccaaagtccggttgcgctcaagttcgaggaaatactcgcctatgtcaatagcggtaatgcacagaaagaatttgtcgccatccaaacggccagaaaaatgctgagccgagagaaaaatccccccattgacaagatgatcggtctgggactggtgccgatttgtgtgaagttcctggaatgtttcgatcgggtagatcttcagtttgaggcagcttgggcactgaccaacatcgcctccggcactacggaacaaaccaaggccgtgatcgatgctggtgctgttccgaaattcatcgctctgcttagttctccctcgaacaacgttgccgagcaggcggtttgggctctgggtaacattgccggagatggctccaaggctcgtgatatcgtgctgaactttaacagcgtagaatcgatcatctatctggttcagaacaccaatactcagctatcgttcttgcggaacatagtttggttgatgtctaacttgtgccgcaataagaacccgcctccacctttcaaccgagttgaaccgatgattccgattctatccaaactattggaccacgaggattcacaagtgcttgccgatgcatgctgggcgttgtcctacgtgacggatgacgatgccgttaagattgaatccgtagttgcttccggagcagtgcctcggctagtgcgattattgggatgtgaaaatccggccattattactccagccctaagaagcgttggcaacatcgtcacagggagcgacacccagacggatgctgtccttgccgcgggggccttacctttcctagggaagctattgcgcaatagcaaaaacagtatcgtcaaagaggcagcttggaccatatccaacataaccgccgggaaccaacagcagatagcgcaggtcttcgattccggcatcttccatttgctgatcgaggtgctcatcaagggtgatttcaagtcccaaaaagaggcggcatgggcgataaccaacacaaccaccggaggatctacggaacagattatccacttggtggaaaagtatcccattatgaagccgtattgcgatctgttggaggccaaggacagtcgaacggtgcgagtagttctaagtggaatttccaacattttccaattcgccgagaaaatcggtggaactgagaacctttgcacgctcttcgaggaaatcggtgccctggataaactggaagcattgcagaaccatgaaaacgaagaagtgtacaagaaggctttccaactgatcgaatcctacttcaccgatgcggaggatgttaaccccgagtgtgcacccaaggaaaaggacggagctctagagtttaatccctccgcacaacagaatggggaaaagtttacgttctagaaatccaccattctccattggtttcgcatcacaaatccaccctcgagtatgcatctcatcgttaagcaaaagtgagattaagactggaaatttatactcctgttgtcctgttttgttcttccgttctcttctggccatttcccaccccatcaatcggttgtaattatcccgcgtcgcatgaaaaatattcattcccattgtcactgcctacggtattcaatattgctttccaatgcgtagcacttgttgtatacgttctttatgtggtaaataaatagttagctttacattgt

SEQ ID NO: 1577 - DNA, 898 bp, Aedes aegypti
atgatttgtcttttcgacgaaacgacacattcaacggaacctccgtacaatccgaggccctgttgggggccgggcgcagagcacttctgtctgaacggtggcacctgtatacacttcgaggatctccaagagtgggcatgcacatgtcccaagggcttctcgggcaacaagtgcgagaacaaagtcatcgattaccaccctacggcatccagcaaacaacaggactgctcgaagggttacggatatggaggttactattgctaaaacaggctttataacaccaattgttgaattaacatattagacacgagaagaaaatgatccccccctccattcccaaccgaacagaaccaaaaacctttcagtaaaatgtcctacccctgtcctgaaatcctaccctgtcctacgataagttatgttgattatttttttacaaatggatcaaattcaccgggcggccatcaaggagacaacaagtattttttagtcaatggaatgtgtgcgatatttgtatgaagtggaaaaatgcgaggcggagtagagttagaatgtcggttgttgttttaatatttcttatcgattagtagcccaatgccaaaaattagcctaagtcaagattttgtttcaacgaccgtgctaggaggaggaaaagtatctaattgcatcctttttcaatttgtaaataatagagaacgagtcatgttttctttgtatattatttgagaaagattcttttctttatataattatgaatttatagtacaaatttgtgtatattgtgtaaaaaaaaaactatttattactgaataacgctaaaacattacactaccgtaagccaaatatttatagctcgaagaaacattccaaatcatggataaatcaattcagctaacaggat

SEQ ID NO: 1578 - DNA, 993 bp, Aedes aegypti
ggaaacgtattcgtaatagcggccattctgctggaacggaacctccagagcgtggccaaccacctgatattgtcgctggcggtggcagatcttctggtggcatgtctcgtaatgcctctgggagctgtgtatgaggtgtcgaaggagtggcggcttggagcggatctttgcgacatgtggacctcgagcgatgtcctctgctgcacagcttccattctgcatttggtggcgatagctctcgacaggtactgggccgtaacggacatcgactacgcccaccagcgaacggcccgacggataggctacatgatcattgtcatctggactctgtcggtgttggtatcaattgcccccctgctcggctggaaggaccccgagtgggaagcccgcgtctacaaggacctgcagtgcatcgtttcgcaggacgtgggctaccagatatttgccaccgcttccagcttctacgtgcccctgctggtaatattgttcctctactggcgaatatttctcgcggccaggaaacggattcggcgaaggcagcagaagggcagtctcggcaacggggtcgagcgggaccgcatcgaggcggatccaccgacagcggatttctccacggcgtacccttcgggacagggcggggcgtccagctcgtccgccaaaccgtcgatcatgaagaagaagtcccaatcggcaacggactccaagcgggaacgcaaggccgccaaaacgctcgccatcattacgggggcgttcgtgtgctgctggctgccgttcttcatcattgccatcctactgccaacgtgtaccgactgcgacatcagcccgctgacgatgagcgtgtgtctctggttgggttacttcaactcgacgctcaacccgatcatctacacgatcttcagcccggagtttcggcacgcgttcaagcggatactgtgcggccggaggcacagtctcaggaggacccggcacatgggcgtgcggcacatgcggtaa

SEQ ID NO: 1579 - DNA, 3107 bp, Aedes aegypti
  misc_feature (2970)..(3107): n is a, c, g, or t
gttttatatgacattgtaacggatctgtcagatttcaaacaaggagtaacgggaaagcaacggcgcgagagtgcatgcacggcatgcacaaacggaaagttgggaacatctggcctgcagtccgaactgtcaaaagtcctccatatttttcgcaaaatccagtcacggcagcggtttcggaaccgaagtgctctttatttccggattttttgcgtgttctattctgttgtgttgtttccgtttgtttgcgatcgatccgcggcggagagttgatccgatttgtcgttcgggttcgcgcgataagtatcggtttagtgcggtgataaactactcttgtttcctttcgttcgaaagattgtgtgttttcttgtgcttctgctgcggtgcggtggagctgaagtttttctcgattatcatcgctcatacttgggcaagtgctgagattgtgtgtgtgcgtgttcttcgttgtacattcaagtatgtctgaaaagcaagccgctgatcatgtcgaagttgagggggaggaacacgacgccaactaccagcctccgccgcagaagaccatcgaggaaatcatggcagccgacgcagaggacgaaagcttacgaaagtacaaagaagccctactgggggaagctcaatcggagaaaattatcttcgatgattccgatccacggaaggttatagtgaaaaagctggcgcttctggtggcggaccgtgatcccatggaactggacctgtccggtgatatttctaagctgaaaaagaatgttttcgtgattaaggaaggcatccagtacaaaatccgtatcgatttcattgtgcagagggaaatcgttcacgggctgaagtatgtccaaaagacatacaggatgggagttcccgtggacaaaatgacccaaatggtcggttcgtacccgcccaagaaagaaattcaaagctacaccaccccattcgaggaggccccctccggcatgatggcacggggcacctactcggtgacgtcccttttcaccgacgatgacaaaaacgaacacctcaagtgggaatggagttttgagatcaaaaaagactggcagtagagaatttattacatgttaagagaaaacggcgattccgaggcagaaatgacggacggtgtgccctggatcaatagtcgcgtgttaatatacatacatattatgcatatatctagaaaggaggagatgaggaagtaagagtattagctgatagtgatccagcttccagttggattaagtaaaaaatttcgtgcttgcgcacctaccataagtgtgccctatcagtcgttcatgcaagcaaaattgaaactgagagattacatcagaagaaaccacaagaataaaaagtcttcgcgagtgaatttatcgctttaaatgttgccaggtatatacattgcattttcaaagtttatatcactctatgataggcaaggcaatgtgaacaaaatggaaatcaagtgaattccgtgagctcaatttctcttcggaggaaaatgtgcaccacaattcaactgaaggtgcatcctgccgagaaagcaaatgccaaggtgagaaaacaagtaattaagaaaaaagattatttgattctttccaaactagctagcttttgtcggtctgtaaatggaaagaaagttatgagaatgtaaactgtcaactgggtgaatgtgatgctgtcgcagccacggtattataactatatggtattatcgtttcctttttaatgagtgctataaaaaaaactattctcggtggatttcgtgatttagaaacattttccatttgtgtcgcaatcaactttatcacaacggttaaaatgaaaacagcaagagtgtgttttctcgtcgtcgctcattttggtttcttcgcactatataatcttataaatctgccaaaaagaaaataaaaaagttatgtgcttcgaaaagcaataaaaccgtatgaatgctatccttttaagctacgcgaaatgatgaaaaacaacaaagaaattatatccaaaagtgctacctttatataagattaagattcaaacagaaaacatggaataaaatcctagcgctgagacaaaaagaacagtttttctagacataaataataatgaaaatcacttttgtcaccgaaagctttaaatgcaaaaataatggttatgcttaggaatgatttctatgctttgtacttttgcattgtttggggtgtgtagcaatcttcgatttttgcaagtttacatatttcatcctgtagttacttacgattctcgggtcaatacctagcttccattagtccagaaattgcatttacggaaacattctattttgactttaacttaatacgattagggtccaaaattagctttggaatgatttttttttttgattttatagttgccagcagaaagttaagcggtttagttgaaagaaacagagcccccaaatgataaaaaaaaatcgcatttatgaatatagattaaaatgaaacaaattgcgttgcataagtaaacccaactggtcaacaaaaatcaataaccctatttacaatcaaaccgattagccatatataaacataggaaactatagatgacaccgcaaccattgaaacccgaaacaaaagccgatgataaaattgatagcgaaatagaaccagtagtagcgccgatattgaaacattgggaataataaacggaaataaactacagtcagttttatgctcaatttgttcaatcaaagacaactgtgaatgtgttttttgttcttcgtagtttgatgtgtatcaccttccttgcgtgttttagtacaatgaatacgttccacgatggtttgcgatttttatagattcctgacacctttttagatagttacatatttgtttttccttttttcgtgtggctacgctaccccaggaatgtataggattaaattcattaaacatgctcaaaaactttctcagacatcannnnnnnnnnnnnnnnnnnnnnnnnnnnnnnnnnnnnnnnnnnnnnnnnnnnnnnnnnnnnnnnnnnnnnnnnnnnnnnnnnnnnnnnnnnnnnnnnnnnnnnnnnnnnnnnnnnnnnnnnnnnnnnnnnnnnnnnnn

SEQ ID NO: 1580 - DNA, 1321 bp, Aedes aegypti
atgcgggataccctaatcaacgatggtgctattacgccaattgatgcggacatttacacatacgagatccatttgccgccctggttcgatgaggaaaaattcaaacgaggtcagcggtacttccgagataatctgacggcaatcgttacggccggattttgcggccttatatcggtgcttgccgtgccctcgatactggatgtgattatcttcaccgagcgatcggcaaccctaacgaaggcttacaagcgctacgtattgactgtgctccacacgctgaattggtaccaggaggaactgcgacagggatccaactcatggaagtcactggaatacgttcgtcggatacatgctgtcagtggaaagaaagccaacactgcaaactcaaggatgctcgtttcgcagaaggacgttgccatcacacagtttggattcgttgggtacgtggtactcaatcatcagaaacttggcgtccaacatagccaggaaggcgtggaaggctttgtacatctgtggcgtactatcggctatatgcttggattagaagacagattcaacctctgcacggacgacttcgagacatctgcccaacgaatggccctcgtaaacgcgcactttttgcgccccagcttgcagaatcccagtgcggagttcgttcacatgaccaagatcatgattgaagggatgtggtgttacagcatactgctaaactacgaagcgttcatgtttatgaccaagcgactttcaaatgttccaggacatcattattgggatgacgaaccgcgagatggtgcaaaaaccgtttataaggaaatgggttggttggacagggtgatgttgaacattctgatggttattcacgaggtgttgctgaattttacactggcgcggtggctcttgaattgggtgttccttttcaacaccaatgttatgaacaagtacttgccgttgctggcgatgatgaagcacggcgtcaggaaagcctatgtaaaaattgtttattgacagggttttttttttttaaattgatgaatgaactacagttaactctcccttactcgatattccgtatctcgatatcgagttagagaaccatagtaaaagttgcttttcatggctaactcgatggtcccttctaacgcagttgcactgcttttgtgttctgtaactcgatacctccctaactcgatggtcccttcaatatcgagtaagggagagatgactgtagaagtctttatgaatttaactcgtcaactaaaacctgcgctcagaaaatacgtagaaaaaaatgattgtaaagatgttcgcaaatataactgaa

SEQ ID NO: 1581 - DNA, 1756 bp, Aedes aegypti
atgatgcccacgattctcgcgcttagcttgtccttgtgcgaggggaaaacgcaggcaggccaacgccagtggggtatgttttccacggaaccgcacgctttgaccaacaacaacagcatctgggatgctggggggttgataagcgagagcttcaccacaacgtgtttccatagcaatacgaagttgggcaccgggagagttgttttacagattcatgtggagattgcgagaataatgccattcgccgttgttcaaacaactaacgcacggggttgcaatgagctgtcggtagtacctgcgtcgtggctgcggggatcaaggagcggaaacattctgctgtggccaaatgtgaagagtgtcgcagaacaggaaagattactccgcgacgaaaacagctccccgaagaagtcctgggtgaaatataaatgcaaggtgaaacggaatcccatcgcatcatttaatgccgcgaagcgtatgctggatgatttatccggagaatcctcatcggaagtcagcaatctagttcgacgtaaacgaaaacccaaaaacaatgaggctaataactttcaagaaatgctcattttaaacgatacgccttgctcatctgctgcagaaacaacctcgtcatcggttcccattgtcattgaggtaagaggaggggttcaaggcgagattcaggatgaatttcctcgaggaacaacatcttcccctcgacaaccacccgccaccgttttgacaaacgttgaggataatgttcaaaatgcccaggatgaaatcctccaacagccactacctgtacttccagtcaatggcatcacgacgctgtctgaagataatgtcccggaaattcagactgttcagtatgtggcgtacgatactgcagatactgtggtggagccgggaacgcaacagtgttttgatacggttatcaaacaactgcaagaaacaaacagcagactggaacgactggagaagcgtatagcaagtattgggactcaaaacgaatttatgttagacgcggtccgaaagttcatctcccatacgacgaacatcgaacagccatcgtctttctgtttcgaccctatcaaagatgagaatgaattggctgatttggaaaataagctgacggacaacgacttcaagttgaagatgattaattggttgcggttgaatgtcagtggcgactgtgcggataatcgcatgcttggagtactcgatttgttattcagcaaggaattccaaacgaaatgcacgtggactggagccagtcgtaaaggaccaaaaactgctataatgccaaatcgacatgttctgcaattatttcagcaagttggaactgatgagtctgaaacggtaactcaacataaactggccagctttttcatgaaaaagctaaaaaattctctcaaacgattactcacaaccggcatgcgtcgtgggacaaggcatgtgagacggcgaaagcagcaatgtgctactaaagatggtatgaaactcgagccagagttcacacctgaagatcatgaggagaatcacagtgatcatgagtccgatgaacatgtttcttcggtcgttgattcgtctgatgccattgaagctgtagatatcgagtcagactggaacgatccagcttttgatgattccagtgaataacatcttgcaacgttgtacttgattaggagccgactgataatgtatctgaagagatattgtaggggagctaggggcaaaataacacatagtaaccaattataac

SEQ ID NO: 1582 - DNA, 1073 bp, Aedes aegypti
actgtgtgtggttgagcagctgcaagtagaatcgtgatcgtgtgaattgatttggtgtttccccaaaatacgaaaggactctttacaacgggcagtgatagtgtgtttagttgtgggtacacgtgtgtgacaaatcgaagaatattagtttagatcccgctgaataaccagaaaaggaaaaaaaaaatgcgtgcgatagtgctaatttcggtcctgtgcgcaggacttacggtcgccttcccacagcaagccatagatcctgcctacctgcgtcagtattaccaacagattgcggctcaggccggtgcccaaggaggttcagcccaggcccgtgccgatgcaacaccgatctacgaacagggagcccaggaacagcaacacgttccacaatatgtccaccaacaggatcagatccaatacgtccaggaacagcagcagttcgctcaacccaagcagattaaggtatcgaagccccgtccagcccagcagtaccaaggactaggccaagccacgggaggccagaagcacctcgaagacgaagaagactatgaccccaacccatcctaccagttcggtttcgacgtcaaagacgacgagttcaccaactaccaaaaccgcaaggaacagcgcgacggcaacgtaatcaagggcagctactcggtcgtcgactctgacggattcatccgtaccgttacctacaccgccgatccgaaggagggctttaaggccgaagtcagccgtcagccaacagacatcgtcgtcaagacccccaaaccaatcccggaataccagcagcagtcccaccaaatccaccagcagcagcaacctcagcagcagcaccgtcttcagcagcagcctcagaagccccgacctgactacacccagtaccagtaaggcagtaggctagcgaggtcaaaaggctgatgatatacaagacttatcctacttcctttccctcaaaaagtatcccttcctacactcctatatcatttagcatctcatcatcttagaaaaagaagaaaaactataatttatgataatattataatagtgttaattattattgtacgtta

SEQ ID NO: 1583 - DNA, 498 bp, Aedes aegypti
atgaaaatcagcgaaagtataacgtgggcgatagacgtcgactacgagggtttccgtaagtttctggacgcgttcctcgactgcgaaacgccggaggaactgacgcggcacctgttcatatcattcctgaagccggccctgtatcaggcccagcacagcagccatggcaaggcgctcagccagatggcggcgatcagcagtaatgccgcctgcgcgccggtcacgtctcacaatcgagggtcgattcccaaccttaacaacattatcgacctgcccactccgcagccttcgcaggaatcgcagcgcaacagtttcgtcgatcggatacagcacggcatcgcggacaagcttcaatcgctgggccacttgggacatggcgacaccagcgatgggagcaggcaggggaaaagcggtgagtacggctcattggtcagtgagtgtacaaattgtagcacccattacagtgcagtgaaagcagtcacgctcaaagttctgtag

SEQ ID NO: 1584 - DNA, 576 bp, Aedes aegypti
ttgttccacttttcgtttcaggacgtcgactacgagggtttccgtaagtttctggacgcgttcctcgactgcgaaacgccggaggaactgacgcggcacctgttcatatcattcctgaagccggccctgtatcaggcccagcacagcagccatggcaaggcgctcagccagatggcggcgatcagcagtaatgccgcctgcgcgccggtcacgtctcacaatcgagggtcgattcccaaccttaacaacattatcgacctgcccactccgcagccttcgcaggaatcgcagcgcaacagtttcgtcgatcggatacagcacggcatcgcggacaagcttcaatcgctgggccacttgggacatggcgacaccagcgatgggagcaggcaggggaaaagcgtgcacccgatgttgacggttacgccgagcccgatgggaggcagcacctcgattctgccggcaccgttccgaaggtcggccgattcgagtccatcgcacagccacagtcacagccactcgcagatttcccggaactcgtcccgcaagagcaacaattccgtcaactgtcggatagaa

SEQ ID NO: 1585 - DNA, 552 bp, Aedes aegypti
atgacccgaaaaaaaaatcctgctgcagacattcggttacttccccgaaagcaatcctatttggacccgatgctgttcaaggtgccactgaaagacgtcgtgtgctatctctcgctgctggaagccggccgaccggaggacaagttggagttcatgttccggctgtacgacaccgatggcaacggagtcctggacacaaccgaaacggacgccatcgtcaatcaaatgatgtcagtggcagagtacctcggctgggatgtgtccgaactgaggccgattctgcaagacatgatgaccgaaattgattacgacggcgatgggtgcgtttcgttggaggaatggcagcggggaggcttgaccaccattccactgctggtgctgttagagattcggttttccgaactttgtgagattaagaattgggagaatttctgtattctgttcgtggtgtggctgctctctggatcgccgaggaagacaaatattgaatattcatatgctggggacagtttttgtttttatgcgtccatagtgtgcatactattgaattga

SEQ ID NO: 1586 - DNA, 785 bp, Aedes aegypti
aaataaaaacaaacatctgatcgtgattcttgaagtgaaatccgcgcgcggttcgaaaatcatcatgccgaaaccccgatccagccgcgtgaaacccggtgcaaagcctcagaagaagtctccgtcaccacaaaagaagaactatcccacccacagcattcctcgctccaagctgaacgcggccataaagttcctagagaagaaaaccccaccaaaagcgcggaatcccatgacggattcctgcttcaagagcatcctggacaaggtgggtgccacccaatctcggcgagttgatagctacatgaacgacacggccaacgtgctggaagtggcccggaactgtgctctgaggggacgctggtcggatctgatgaagacgttcgccatccagatggagagcattcggcgatacgacctggccgcggcgctgaggaatgccctatttgccatcatagccgacccggtcctgaacgatccgtcctttctcgaggcgtatctgtactccaatccgtactgtaccaaccagagcgatttgaagtactgcatggacaaaatcctcgaagttttccagggcgttaccatccacacgaccaaatggaaaccagccaaggaggatgaaagtgaggctgagattgaccaaagcagcggcgattcctcatcatcggatgatgattagtttgagaaataggattaagatgttaaaaatggctgtgacacgtttttgtaacggaattctaaataggtaataaaattgctctgtaatattttttccgtcctcttgcctt

SEQ ID NO: 1587 - DNA, 1212 bp, Aedes aegypti
atggaacggctctgcagattgtgcttagaaggtgggtccgatctgggacccatctgcttcaatgacggtaacaaggaaatcaacaatgttgacgacgcttccacagaacaaagtttggtacaactgattctacaatatctgtcgattcagatcatcaaggcagaaaaccccatgaacaccttcatctgcacgggttgtaaatctctgatcgaggaatggcaccggttccacacctcctgcctcaaaaatgatgaaatctaccaacaacgcatccaagagaatataaatgcagataagcttaatgaaatagtcgtaccgatgaggctcaaacaggagcaattggatacgatcggtggtgaggagtctgtccaggatgaatacgatccagattacgatccacaggtttcaagcaatgaagattatggaaattataataatgcagaagataacgaaaatagcgatgaagaaggcggttccgagtactcaacatatgagtatgaggttcttgaattagagtcagcatcgaaaacaaaaagcagaaagggcaacaagactgattcgaaaccgctttcgacaagacgaggaagaccgagggtaaagccattggatgaccccacatctaaaactacaaaacgggctgaggtctgcacgatctgtgggaagttcatcaaaaatctcaccgagcatatgagaattcacaacaatgaaagaaggcatcaatgtccgtactgtgcgaagtcgttcgttagtgcttctaattatagttcccatgtcaacatccatacccgtgcaaaaatgtacaaatgcgacctgtgcgataagcagtacgcgttgctgaacagcatgaagcagcaccggatgacgcacttcaaggatcgaatctatctgtgcccggtatgtgggaaggcgtactatcaaccgacagggctggccagacataagcggacccactttgagcaaccaaccatcaagtgctccgagtgtgacaaaatgtttttgactaatggggatctgaggaaacatttcaaaaagcacctcccggagaagccgttcagctgtgagatttgcagccgcgctttcaatcgaaaggataatctcaaaacgcacatgaaaacccaccgggaaaagatacccaagccagatcctggagacaaaccatccgaagattccgtgccgcatgtcgaaatcaagttggagatctccaaggcgtaa

SEQ ID NO: 1588 - DNA, 741 bp, Aedes aegypti
tcaatggaactcctatcagacgaaggccttcggctggacggacggcgagccaacgaactgcgccgcattcagtgcaaattgggagttttcagccagccggatggcagcgcttacatcgaacagggcaacaccaaggtcctggcggctgtttacggaccccatcaggccccggccaagaagagcagccacgaagaggtgattgtcaactgtcagtacagtatggcaacgttttctactggggaacggaaacggcgaccccggggcgataggaaaagccaggagatgaccatccatctgcagcaagcgttgagtgcggccatcaagaccgaactttatccgaaatcgcagatcgatgtctacatagaagtcctgatggcggacggtggcaactattgtgcttcggtaaacgccgctaccctggccctcatcgatgcgggaatctgcttgaaggagtacgtctgcgcttgtacagcttcactggccgggaagatacccctgatggatgtgtccaacttggaggaaatgagcggaggaccgacactgaccgtagcctctctgcccagcagtgggaagattgcatttatggaaatgtcccaacggttccatctggaccatttgcccaaggtgctggaaacggcactgcagggatgtcgggaggttcagaaaatcatcgatcaagccgtccgggagcacgtgactcagttgggacaagccggggattggggaagtttagcaaaataa

SEQ ID NO: 1589 - DNA, 3231 bp, Aedes aegypti
aaaacccgtttctcgaaacgtcatcccgctatgcgtcacgcgcgtgtttatttttgttttgcctgccaccgtcgacgggacgtctctaccggtcagtcagtctatcagtcagtagctaagaaaatctactacgtgtatggtagtagcagcatcggctgatattttcgttcatttttggttatttttatccggcgattggtcgttcgttgttcgggggataggcttggccctaatggcttaacccggtaacgtcgggacagcctccaatttttttgcgagaagaactgtagaagactagtgcagatcttttctctggcgtcagtggcacccggaagtcaaaaataacgcatcgatggccttgttggtattcttgatcgcagctgcccactgtgtctacacgccttttacaaaggtggaggagagcttcaatcttcaggcgattcatgacttgctttaccatcgactaaacgtgtcacaatatgaccatcacgaatttcccggagtggttcccaggtccttcctgggaccgctatttgtcacatttctggtgacgccaatcgctacggcactcgattatctcgaagtaaacaaattctggatgcaatatgtcgttcgcttcgctctggcagcgattgtggtgttcgcgtggaacaagcttcgcgtcacaattcacaaacgacttggcgtttccgtctcgttgtggtacattctcatcaccattacgcagtttcactttatgttctacatgagtcgtccactgccaaacatcatggcactgccgttggttctgctcgcggtgaactactggttgacacgaagtgtcaaaccgttcattgtatgctccggagctgccatcatcatcttccgagcagagttggccatgcttttgggattgtatctcctgtacgacttgtactacaaacgagtgcacttggatgttgtgctgaaaacgacaatcatagcaggcgttgcgcttgtgcttttaacggtggcagttgatagtttcttctggcgccgcctactatggccggaggcggaagttttttggttcaacaccatcctgaacaaaagctccgaatggggtacctcgccgttcctgtggtacatctattcggcgctgccacgtgccatgggactatcgttgctgttcgtccccttcggattggtcctggagacccgcatccgatcgctagtcattcccgcggtggtgtttgtactgctgttctccatgctgccgcacaaagagttgcgttttatcatctacgtgtttccgctgctgaacgtagccgctgcttgcgcttgcaataggatatggattaatcgaaaaaagacaatcttcaataagttcctgtcgttcgtggccatcgggcacctgtttggcaatgcgttcctgacgatgttcctcctgttggttgcgggaaccaactatcctggaggagtcgcaatatctagattccaccggttggcagctggcgaggctaacgtcaccctccacatagacaacctggcagcccagagtggcgtttcccggttctctcagatcaattcagattggatttacagcaaagaagagaacttgttcccaggtgagaagcgactgcaccggttcgactacctcctaaccgaagcgcgcgacaagtactcggatgagatgcggctcctggggcagacgcacgaaatcctggagtttgtcgagtgcttcaacagtatcgggctgcagtacaagtcgctgctcccggtcaagatcaagaccaaaccgtgcattttcatcatgaagcgccgtgagggagtggatcccgccaggatccggttgaacttcgaagacatactggaaacgaacagtatcggtggaagcggatcgctgagcgatccggagtttccgacgttcgaaatcgatggacgagaggaagatgagatggctcagagtgaacaggagcaggagcaagaggaggacgaggaaacgacaccagaacctgaactggaagagttgaacgtgccagaggagaaggaagaacctcagcggtatccgaagccgattagaaatcgccgcagtaaggaatcgacgctgaaacccttgcaaacggtgaggaaatccacctcgaagagtcgaatgaaaatcaaggagattctcgaggaaaacgctcaccttctgaaggaagacgacgggagcgaaacgcgtgagcagaagcgggttaagatggcgtcctatctggcgaaggcgtcctcatcgacgcagctcaagacggcccagaagatcatgcgggaggagaagctcaaacagatggctagtgaactgagcaaattagactttagcgggctgtgcaatctggatcgaatgtcgacgcgggagtgtctgcggaaaattatcgacgaacagtacggcgaggaagacgaggatgatgaggtagagggcgacgagtgaagagttggaggggtgattggtagaaccaccggataatagctttaaagacaaaacgagaaacgattagaccgaatgacaactttcaatcaagggttttaaaatgcgtagtcccgaaggtaaatcacatcctttatgtgaaaagacgatgatagtggttggaaagctcctgctccgaagtttgtaagcttcgccctgtattatccaaaactaggaaatacattcggctgattcctagttgcggatactacatgtcctagaagctttcaaatattttcctcagatgcttggaaaacttctttccaaatacataaaatgcttcttacatgcagaagtttaaaaagcttctccctgaagctaggaaatcttctacccatgaacgtagaaagcttcttcatgaaacttaaacagctactttgaaaatcttggaaagcttttttcagtagcttggaaaacttctcctcgaactctgctaaagcttggaatgcttttttccagaagcttggaaaacttctctcaaaagattgaaatgcttctcccagaagtttaaaaagcttctccaagaagcatggaaagcttagaagattgaaatgcttctcctagaaacttcaaatgcttctctcagaagctttgaacgcttctcccagtagcttccatgaaaagctcggaaaccttttcccctgaagctttttccatgagcttttgaaacatctcccataagattttgaagcttgtcttaaatgctttcagaattgtggccattttctaagtagaagcttggtatcttctctgtagaagcttgaaaagcttct

SEQ ID NO: 1590 - DNA, 1176 bp, Aedes aegypti
atggaacctgcttccgaattccccggtatctgccgggtgtgcctatcccgttccgccaacaatgataagtatcgtgccttgttcaaggtgtccttaatctgtggccaaaaacgtcgatttatggacctcttgctggaatttctcccggtgctggagatctcacaagatgataagttaccaaagtacatatgcaccaagtgttcgttatcgttgaaacatttcgtaagcttccggaatcgatgccttaaggcggacaaagaactgagggaacatccggagcgttatatttccattgagctcgagaagcctacaattagggcagatttctccgaagaaagtgactcgggagaggtaaatgaaagccacaatcttgccaccgtagaggttcaagaaccgtcgccgaaaatccgggataacctaatcgaagtggttgacaatcccaccgagatatttgaaatacgttcggttgatcccccggaaggcaacgacaaaagtggcctgtttgagtgcgaccagtgccataaggtgttgggtaccagcaggtccttcaaatgtcacatgcagcttcactccgagctagccaacttcctgtgccagagctgtggcgaaaattttaagacgaagatggcctacattgggcacatggccagtcacgatccggagcggttcaaatgtgacgtttgtggcaaatcgtatcgccaggccgcttccctccggaatcataagctcaaccacagccaggagaagcccttcgcctgcacgatttgtggccactcaacaacccagaagagtggccttaagaagcacatgttgacccactccgagagcaaggccttcgtgtgcgacctttgtggtgatcatttccggttctctagcaatctccaaatgcacaaacgccggaagcatacgatggtgaaggaccacgtttgttcccactgttcgaaggcgttcgtttcccgggatgagctgctgaatcaccagatgtgccacacggacgagcgaccatttgagtgcgagctgtgccggaagacgttcaatcggaagagttccctgcagttccaccggaggcgaaagcactcgatgctgccgatgcatgcctgcaacgtttgtggacggggtttcagtcagaaggtttcgttgcaaatgcatctcaagacgcacgttttgacggattga

SEQ ID NO: 1591 - DNA, 2711 bp, Aedes aegypti
ctgaaagtgtcaaactgcaactctgcagaaaaaaaggaaaaaacgcatcgcgccaggcaacaaaaaaaccactcgcaaaaaaattcggtcgcgttgtttctcattcgtttggcttcctctgtgatcggattgaagcgtccgcattttgttcgcatgcgaaaaacaaaaaaacattcctgtggctgtgctgttcgcgttgtgatttatttgccctgaaaagtatctaggtacaaaaacaatcgtcacttgccgccgccaaacaaaatggaaacccgcgcctcgataagccacaatccgacgccccaagcgacgaaagtggccgcatccggtcccaacgtgtgccgtgtctgcctgcttagcggaggagcgaccatggccccgatggaatccattttcagccccgtcagcgattacgaggaacagaccctgttcaatctgctggtggccatttgtgctcctctggggcaaagggaaacgctggccattgggggcgccccggaacggatctgccttgggtgcaagtggcgactgttggccgcctacgagttgcaccggacttgcctgcgcagtgacgataagctgcgggagcgaattgaagccatcaggaagaagcaacaaccagttcccgagggcgaaatccgaatcaagcaggaagtgctggacccagatgagcaagacttcaaccaaaactccaccgttgatgcgacaaatttctcattcttgctttcggatcactatttgccggaggcggaaagtacaatgcaaaacagcgagctgcttgaggaaatggcccccgccgaagaggaagtggacccgaatgagacgctcttcgaagagaactacaaaacaaacgacaagggtggccacatctgcgggatttgcgagcaggaatttacgtacaaaagtcagtgccggtcgcacatcattaccaaacacgacccggccaagccattcaaatgtgacgtgtgccattacactttgacgacggaactccgtctcataagacacaaagccataacccacggagtgggagtgttaaaacctgacgatcattccgaggaaatcgacgaagccggtgaaacgatctacacctgcaaaatatgtaccaaaacgttcaattctcttgtccgtttcaagaagcacaaaagcgtccacgtggcatacaatcggccttttaagtgtgatatttgcttctatcggttcccaaaccggtcccaattgacccagcatgccaaagtacaccaggagaagtcggccgaggatcaggacaacgattggccttgtgagtattgcgaagagaaacttcctgggaagcgggcccacacgatgcacgttcgccggttccacccgcaggagttgcagaactcggaaaacaaagaccgaaacgagtacaaatgtatcatatgttcggaggcattcgcgcgggaaagtgtcctgaacacgcacatgaaaatgcacgaactgctggtgtttgagaaggagcgcgagcaacgccaagagttggaactgctcatcaagaaagaatcccaagctcacttcggcggaggtggtgctagtggccagagcgaactcatggtggccgccagcagttacgatatgtcctcgattaacgtcaagaagaaaagcgatgccgacgtggcgttcgtttgcatgatctgcgaacaggagttcgaggagcgagagttactgcttcggcatcagcgaaaacttcacaaggagctagagttgaatatcgtttccggagcgcaggatgggcagcaacaggctcaatcggcagactcgacttccccgatgaatgacttcacggacagctcgttcgccgtcgacgattcggtgatgatcgtagacctggatccagcgcagctcctcggcccgatggactccgagtctacccaaaagaatcgttccggtgcccccgtgcccaaatgtgatatctgccataagacattcatgtacaactctctgctgctgcagcacgtcaaaaacagccatagcgagtcgaaaccgttcgagtgcaaggtttgccggatgcgcttcagctaccggggcctgctgcagaagcacgaacttacacattccgcacagaatatccgaccgggcgagcacggatccatgatgttcaagtgcaaggtctgctcggcccagttcctggagatgaaatccctaacggcacatctgagaatccatcggccgggcgatggaatcgtcgtgtccaaaaaggtgaacatcttccagtgtaccacttgcccgcaggttttcaacgagaaagtcaaactggacgagcacgtggccaaagttcaccacaagcagcagctgcagcccgggggaactcacatgcgcattaagccggatttccgtagggttgccgaacggcagcagccgatgagcgagaaggaacgattcttcgggagctttgggatcgtcaagctggaacagaagaaagatcgggttggaatggaaacctcttgagatgggggagggtagaaaggacggtttgtattggaaagacttattgttagtatttaggccagtagatgtatcagttgataagtattttccgactgggagacaaatagctatagaatttgattcgcatgtagttagaatgcgttataactacgtggatatatgtggaaaactttataagtgtatgatatcattataatataaagagggactataataaaggaatattcatttttatgccataa

SEQ ID NO: 1592 - DNA, 1706 bp, Aedes aegypti
atagaccttcgacgccgaacccacacgacgcaaacgcgaaacgtctacatcagaagtgtcaaaatccaccacgcactgcatcgccacacgcacacatatcgggacacgtaaataaaaataaaatcatgactcacgaaacgacttttctcccgtatgcataaatatgttgcacgacaaaagcaaccggccgtgctactacaaaggagaacattcgtcgtcgtcattttgaaaagattggaagtcaaagagcagagcgtccactggtagaaactagaaacagtgaagtgaaaaatctccgttttttgcgactaatttcatcatcaagttgaaggttgatcttgtctcgataagtaattaccagtcccacataggaaggaaaatcccaccttccccaagatgagtctcgtttggagcctgattgcctccttcctctatgtggagatcttcatcgtgttgatgctggtgctcccggtggccagtccccagcgatggcagcggttcttcaagagtcgcttcctggcgatgctgagcaggcaagcgcagacctatttctacctgctgctgttcgtgctggtcctgttcctgctggaggccatccgtgagatgcggaagtactcgcacgtcgatccagccgccgaacagcacctgaacgtgggaatgcagcacagcatgcggttgttccgtgcccagcgtaacttctacatctccggctttgccattttcctgtcgctggtaattcgccgcttgatttcgctcatcacatcccaggcccaactgctggcccaatcggaagcttcgatgaaacaggcccagtcagccaccgctgccgctcgcagtctgctttcccagcagaagaaggaagacgaaaccggagacaagccaaagccctcggctccatcagctgacgaagctgacgaacttaaaaagcgcattgccgagctcgaatcggaactgaatcgtgaacgtaaagataaggaagcgatgaagtctcaatccgagagtcttaaccgcgaatacgacaggctgactgaagagtacagcaagctgcagaagaaaattgccatctccagcaatgacaagagtgactaaacattacgaagtttagtaaccatttagatgtgtagagttggttttcatcctgggttatccacttcgatagggttcattgcataactattcacttatccattgtgttgactactgatatcactattcactcacattactatcattttttaaactaattccaaatcgtttctaaatctagtttatctactcccgaaaaatactgttggacaactgtttcgtaattcacaacaaacttagaattattataaagagaaaaataatgaagctaatcacttcttttttgacaacgtggatatggttaaacatgatcaagaagacttattgtacgacatatgcaacaatgttcttatgtatttagatgcttgaatattcaaataaaataaaagaaggtttaaataaatacattttatcttttattattaagttatgaaaacatatactccaactgcctaaacactctaacatccatttttgtcataggggcaatggggcaatataaacatacggggcaatatgggccaccctggattatatctcaaaaacagtgttttaatgtatagtgtcattatgatctgctagaggatgcttcgaacagccaccacaataaaaaccgtaag

SEQ ID NO: 1593 - DNA, 1692 bp, Aedes aegypti
atgaaacgtctggaactggagctccgagagcaggaacgtaagttagagcatcagaccaaggaagctgaagtattactacagcatagacttgagcaggagaagcagcgcaaagaaatagaaatagaacagcggcagctagaactggagcagaccatattggaagaatctttccgtttgcgggaaattattgcactagatgatgatgaagaggaagacgatggcaaaagtgttatctctgagcaaagcacattcagtaaagtgaacaaatggaaaaccttaagttccacaatggtagcctcaacaggaagggttcacgaaactggcctgaataatgacgaagcagcgactgggactagaatgccatacaggcagaaaggcactcagcatccgtctagcatcacacagggtgttctagaaacggcgttagcgggtatttcattagggcagtcatatctagagccatctcttggaggactaattggtcggactgagaacaccatattgccggttgttaaggaaaatcctctcttcgtttcccagcctgcaaaccctatcggctctactcagttagccacgaacaatatatctcaaaccaacattctcttggatccagctcgttcatcgttcagccaacaaccaacgcataattgccccccggctgttgcacatccaggtggtgtctgtcaacgaaatgaagaagaaatgttgagaagaccacttccaccacgaacaatggatgggtacgtaccaaccaggacacagttggaacagagacttccaatatcattcgaaccacagcgatctttcggtcagcagcaacactcgacaatccggcaaaaccgagagcagcctgaatcatctgaattgccagcggactgggagggaccatccgcacggcaattggccgcaagacaggtcgaaaattcgaataaagtccacataggtaatgtaacgtatgttacgggtcccatacatatcatacataccggagggaataacctcggatccatacagcagttcataacaaatgctccaccggtttcactgccttccaatggaacgacgacaccagcagtttccgatacaaacaatggaaaaacgaaagaggaaactgaaccacccgaggaagtagaacgaaatcgggacgaaatatttgtttccaacgtctctaaaaagatgaacgccaatgtgctgagaataatagatagacgatcatggttggcgcaacctgctctggaataccaggacatgaaaactcccgttccttacgtaatcatatcccacaccgccacagaatcagcagatacgcaagccggaatggtttacatggtgcgaatgattcagtgcttccacatagagtcgaggcgatggcacgacatcgcctacaacttcctagtgggcaatgatggaaatgtctacgaggggcgtggatggacaagggtgggggcacatactcagggctacaactcacgagcaatcggcatcagcttcgtgggctgtttcatgaacgagattcctgcgcaaatagcgctcgatgcatgtcgggcattgattggaagaggtatcgaacaaggatatattcaacccgactacaaactattagcacactgccagtgcagtgcaaccgaaagcccaggacgtaagctcttcgaaataattaagacgtggcctcactggacggcagaaccatga

SEQ ID NO: 1594 - DNA, 1928 bp, Aedes aegypti
atccggcgccggcgtcgtgcggcttttgacttttggaggtagtcgttttgtttttcggtgcagtgcgcgttcaaaataaaccgttgtcggtcgctcttttaaactcttttaaattctcgattaaatctgttgatcaatagtgtttggtacaagaaatactaagaaaatagacccatcatcagtatgtctctcccagttttttcagaatctctctgttcggcagtagattaccgccaaacgaatttgactgaacctttctcacaagcactttgtgtaagcgactcagatgaaacactttcccaggatacctgtcggagcgaatcgccattatcagcgaaggaagaacgacactcggtggccgttgtcgatttgacctcgttatcaaacagctttaatgagacggtctcgtcgaaaaaatctgaggacacagaaactgccgagaatacaccatgctcactgatcgtgctctccgatagtgccaattcgtcttctgcacagctcaattgttcgaccgtgaacagcacttcccacagattgagctcggcagctcaagctcgtctaaatgatttcttcgacaacattcccagctctgtgtcggaagttagcatgagcaaagcggattataaaatgaccgacactcagctttccgccgacaggttcgggaatgtctccgacgaggatagcaaggaagtatctattgcggagacggaagcctcggacagaatctcacccgtacctaaaccagagcaacccaaggaacaccataccccgggaggagttcgaaatgtgaaggtcaacgtttcggctaaaatcaaaattaaggtacacgtgtcggaactgtcggaaagcgggagttctgcggaatcggaggacggaaatgcccaaacaggctcatcgaaagcgaatcatcagggtctgcagaaatcggaaccgatcattgataacgaaatggcggaaattctgacggagatctacggcaatgcgtggcgcaccccggaggttttggctctatgtaaaccgcaaccgaaaaaagcacctgaggcccgaaaagatcaaaaaaagtcaatgcaacaaagccgtgaccaccgaaaagtttcgtttcttcaagcgctagatgagaagacccctttggacatgtgttccgcggacatcagaaagtaccgaacacatttcaacagcactaaagacaaattgatggtccagctgtatgagttgtacaaccgggaagtgttcgaaaataaactggacataccgttcagttggaacaaaaaattgacctgcaccgcaggacgatgttttaacattaggaagaatggagaacgatcgtgccgaatagaattaagtgacaaagttataacatatgccgaacgaatgcggtccacgcttatacatgaaatgtgccacgcggctgcatggattcacaatggggaaaatggacatgggaaacattggaaaaattggacgtatcgcgctcggaaagtttttcctgaattgccacccattaccgtgtgccatcactatgaaatcgagtacaaatacacataccagtgtgtcctttgcaaggctaagtataatgctcacaccagatcgaaaaagaccgaaaacattcgatgtgcctattgtcatggaaaaattgagctgttcgtgaataagaaaaataaagacggtgacaccgtggccactccggccaagaagggtaaaggatttgcagcgtttgtcaaggaaaagtacaaacaagtgcgacaaaacgagaacagtcatgcggagactatgaagatcttaggggaaaaattcgctgggctcagtactgaacaaaagactctatatacacaataatatgacgacaacaatgtgaattgttgaattgttttccgtgaaaacgtgcattttaattttcttactttaaaataaaaagtcaaagaaaccaa

SEQ ID NO: 1595 - DNA, 1615 bp, Aedes aegypti
ccactacaccaggtccgaccccggtttcttcaatgtttggcttctcgttaccagtcaagaatttcaaaagaatatagtcctgagtgctacaaaaaatttagcaagaaacgttcatggaacttttgccaaggattgagccactaacatcccacaagaaaaaaaagtgcatgggcagtgtgccaacagaccatagcttggcaaactttttaatagattttcatatctcatgcctacttgcagcgaagcatagtgtatacttttcacattaacgacaatacgaaacatgtttaaaactgtgataactaccaactactgactgtttaattccgtttcgttgcaggtggtgtatgtctcggacacggcaggatacattccattaacgtcacttcaagcagcaacccatcaacgactaccgcccgcttatggaagcgacattgaccctgcatggcgacctgatccctgggaccgggactacaatcggcgacatcgctttaacaatacgagagtacaacatattgaggctgaatgtcaggatgattacatgaaaatcagaattggtttcaatggctccttcaacggattgttgtattcatctggctacgcttacgatccggactgcatgtacatcaatggttctggacgggactattacgaattcctgattcagttgaaccgctgcggtacattaggaaagaatgccaacggtgacgacagtcgcaagaatccaacgaaaaacttcatgtggaacacggtgacggcgcagtacaatccgttaatcgaagaagaattcgatgaacactttaaggtcacttgcgagtatgggtatgacttttggaaaaccgtaacatttccgtttctcgacgttgaagttgcaaccggaaatcccgtagtatttaccttgagtccccctgagtgttacatggaaattcgaaacggatacggaaccaatggggctcgagtgaccggtccagtacgagtaggagatccgttgacgttgatcatttacatgagaagcaaatacgatggattcgatattgtggttaatgattgcttcgcacacaatggagccaataaaaggattcagctgattgatgagtatggatgtcccgtggatgacaaattgatatctcgcttccgtggtagctggtctgatggaggactttacgaaacgcaggtctacgcctacatgaaaacgttccgattcaccggatctcccgcactgtatattgaatgcgatgtccgaatgtgccatggccgctgtccaagccaaccatgtcactggagaaatctcaagggaattgctaagcgagacgttcaacaagaaaccaactccaccttatccgataacatcagtttattccaagccctaagagtcctgcaggaggaggatgacgacgaaaaaatcaaaaaagaagctgccactgttgccagaccacaagacgcctcggaaacgtgcatgaagacatcgttgttgtcagcaatgctggcgacgtgttgtgtggttttgtgtatcctttccgggtcccttctggcagcatgtgcaaagcttaggtatcgcaagaaggatgatggatttttcaacgcttacgtaggccacaaagcccaactggattga

SEQ ID NO: 1596 - DNA, 2156 bp, Aedes aegypti
gtcttccatcataaagaacctttgtgtgtaccatttcgcgaaacgtcaagtgccctattatgagttgttcgcgctgagaccacttctgagcacaacagaagctgccgctttcttgaatgaacaactgacgggagctgatgcggcgaacatcacagcataactgctgataatcggaaactggaaagaaatggagcgcttaagcactagaatggtgcagaatcgacacttccggatattggtgatggcttttgcggtgcttccactggcccgagcgcaagactacgatgtgactgacatccagtgctcgtttgcctcgcaggggtccaacttgggtgacatcataacggccaagctgaagaaaccgatcggtttcaagggggcacccttgtttgcagacgatcgcgccgtcaatcccgaagccgacttcgcatgctccatcaagcaggaccggaaagaccccagcgagctcagcttcgacctcaagatcaccgacttctcacggtgcggtgtgctgaagaggaatggtttcgtacacgtacggatctggttcccacagttcccgtcagttgtgatgcagtccgatcaggaattgatcatcatgtgtaaacccccggagcccacagttattcagaataaggccgccggttttgctggaagtttcccccatggagcacgtgtctccggtgttgtcgaagaaactcccggccgtctggaatatgaagtagcgctttacaaggaagctcctccgatcgctcgaattgctggcatgaaaaaccattcatccaactctctaccttcggttacgaataatgaggttccagtggatcaagcagtccctattggaacgaaactgcaactgcgggctcgcatcagtgctcaaagcgtctggaaatatgtcaaactgctggaagtgactgtttcacccgatccagatgatccacatgcttccggatcggtgtctttggttcgcgatggatgtcgtaatcgagatttcgcctcgatcattcctcatcagcccgctcgatatcgggacaagcccaatgaggtcttcctggactttgaagctttcctgcttagctcgatgaaggaacgaagcactctctggatccactcacagatcaaggcctgcatggacgcgatggattgtcaaccggatttttgcttggatctctacgagcctaccaagcggaaaggtcttggaagacgtcgtcgttctgcaggagaaatagcttatggaaatctcatatcaatgatcggacacgatcggcatcgtagggcttccctgaacacgaccgagttcaccaaattcaaagaaaatatagaatatactgtgatcatgcccggacagtatgacgacatgaggtacaaagaggtgcctgatcagtgcaagaactttgtgatgatctccggattactagctggattgctggcgctttcgactataattacttgtggtttggcatcacgactccaaggtaacgggaagaagtcctcgatagatgagctcaatgttaagggctattctggccgggcaattgtacagtaatgcgaatcagctctcattccaatcgaccatccagttcatcaccgtgatccaaaatattacatcaaagattaactccctgttcccattattcaatagttcaccccgtaaacaaactagttatgagcgctacagaatactgtataaacttaagaagctagacaaaacaaatacttagatcgtaaggtgtagcacccattttagacgtcgaagaagaaacggaaactggccacactgaagcatgagcccaatttttaaaccttactacgttttcgaagagtgaaacactcctttaaaaattgggcttaccagttagggaaccagtgctgcgtgtagaaaaaaaatccaagggtaaaagcaatcgcactcgtaaagtagacattttgattcttttagagcaagaaccgatgttagcgaagaccggacgttggcagagctgccagcagaagcatttaatgttatcggatatttatttatattttctttgtaagattattttaactgactaacaagtttgagcgaagggtgcccgtgcgtgtcgaatcttttcgaacttggaatgcattgtacagtgattttattcgtaaataaatagttgagtttaaataaaaga

SEQ ID NO: 1597 - DNA, 1904 bp, Aedes aegypti
caagcaccgtctatccagcgttctattggctgccaccatttcaaatcacatcttcatgcacacgcgctcctgtcttctgtgctctactggcatgccgaaacagaagggaaaaaaacatcacgttggtgtcaattggaccattgatgcggtcagtggtcagtgatcgaatctcggccaatcggctctctcccccaaaagattcttcttttttcccaccgccacttggtagatcaaccggtactcacgacgactcagtcaacgagaacggagtcttctccccgaccactcgtaatctaatctatttcaatcatttgtgaaccgtgataaaagatagacatttatcagattattcctcgggaggaaggatcctcattcactaccagcacgaattacacatcggaaagaagataaattcgtggtgcccgcttgagtggccagacttgtctagttgtgcttgtggacgcgagtgtaaggggggaaaatattattacgttccttcagttggtgctctatccggtgaacattgtttgctcaggattttctgtttcttcggccatcacccaacgagccattgctggtaccaatcaagcttcagagtctcgacatcgccccaagtggatgtggaaaattttcgtaacgcatcggagaaccagttgttgtttctactattatttgctgtgaacttcgccaagaatctgcttgtttgtgattttgacttcttactaggaactaggcaacgagaaaaagtcagtgcgagtggaaaatgaaattatggtaaaatatttgccatgatgaaataacattcggacaaccattggactgggaaatcgttatcgcgaagaactgtggaatgactttggtcaggctttgtgagtgagttccaccgaaaatagttgagaaatcattttttactgagtgatccaccgttgagagttttcctattcaaaccctgaatgcatttgcgtggcaaacgaaggcaaattcctttctaaaagaaactgttcacgttgtgaaattgcaaaccaactgctattgaaggtatttggctaggtgcaatctacttttcttcgaagaaaaaaaaatacacgaaccgaaagcacccacaaaaaatgttcatcaacagaagtaggaagcacaccaccggctcaataatgctcatgacgagtctggcgttcgctttggtccttttgatggaaccggcagccttggtggaagcacaagaggcagggaaccgggtgcggagtcacaaagctatggaaacattcggcagcagcagtgtggtacaacaaccgagatccgccactaatgagcaactgctacaggacgaagatgaggatcaggacatggtcgatggaagcagcgttgagagcagtgaagatggcattagtggtagaaacagtgggtctggtggtagcagtgaggatgctcggggtacaactgatgtatcgtcggaacaacaggatgtgacgacgcccggaagtgttggttatgtcgcaacgactccgaagattttgaaatcagcgaaggtgcttagcaggtacgagcaaggtctggaggactacgaggaagccgctgcccgagtagagcaggaagacaaccagcaacgggaacagcagcagcaacagcaacaacagcagtccccactcggaggcctgatgaatccgatcctttcgacgttgttcaatgtggtgacgacggctttgtcgtcaaagagatcgatcgaggtggcgggacccaacccggccatgatatttggagcctggaacaacctccaaaaggcactggacgatggcagagctagtgcccgggccaataacgatgccgaagaatcaacaagcagcggcgatggcagcggtaacgatgcagataatcaaaatgcaacatgcacggaggatatgctgtaa

SEQ ID NO: 1598 - DNA, 2618 bp, Aedes aegypti
tttgaaaaggtcctgtataaagggatgatttggatttatgtttagaccatgctccggtttcattcacgtttcaaatatgatcttggcttaataaattcaacaattctgcgttcaaattacgtaaattacgcacaattacagtaatatttgcccaaacaaatcaacacatgacgaaaacttgtttttgtttataccggttgcttattcagaatgcgacctaaggaaaagtatagcttgatttttgttgttgggtagtaaaacgtcataatattgattattgtttatatgaaagaaatttttggactgtttgaatgttgtgattggaaacgtaaaataactatcatttaaatagttttccatgagcaaaacttatttgcgatcatgctgagcaactggagaaattggtgtcgcttgtgtgccaacgagtgtgccgtttacaaattagaatcgctcgacgagctgaacgaaataacgatgaggcatttcaagttttcgctgcaagaactcaacgatgtttgcaactgtatctgcgaggaatgttataacttcatcaacaagctggatcgattcaaagaacgatgcttgcagaccaataaaatgctagtggaactatgtgcaacctgcacagaagatgacgagctgatggacagcgatgtgcaggacctacggtttcggtttctgagtgattcgattctgacgactgccgaagtagaacagggggaaaagccacaggtgcctggaatgtttcatgcagtacaagagcaggccagtgcagctatacctgccttggaacaagaagtggacacaaatgttttggtcggacaaaacctggttgagttaagaattgaaaaaatgacttctagtaaacgaaaaaaacgagcatcagaagagattccactatctgataaagaaatagaaaatgagaaaaaggacatgctacaacatattgttcaagaagacagacttctcacggatttgtccgacgtgggatacaccgaactaagcaataatgttcctctgatacatgatgactcagatattgacgacaacgatgaggtccatcaagacgaggagttcaatgttttggacgattttgacacagatagtgaagtggaagtcgccgatgttctcgattgtaaaccggcagcgaagcggagaaagctccctcacagtaaacagtccaaacaaatatttaaaacaaaatgtgaaatctgtgataaatcgtttcgcactcgatcgttgtatgttctgcatttacaaaacaagcatcctgactcggacgagctctcgtttccgtgcaatacttgcccaaaacgatttccgtcggaaaggaaagccaaactgcatgaattggttcatctgccgagcgaacaaaagctagtacatccttgcaaatattgtgataagaaattcagcaagttagtgaacgttcaagcacacatcaaagcggttcacataggggagcgaccgtacatttgtgaggaatgcggaaaagctttcggtactaagggagcattgaaggagcatcagattactcacagtgatgataagccataccagtgtgcccattgtccgaagaagtttaaaaatttaccacggctcaagactcacgaagacatccataatgacacgttatacgtttgccctcattgtggactgcagttgaataccaagcggacgctgaaaatgcacatggttgtacattcggaccagaaaaaattcaagtgtcagtactgtggcaacgaatataaacggtcaaaggccctgaagaatcatctaatcctccacactggcctaaggccataccagtgcccgttctgtgagaaaacatttgccaatggatcgaactgcagaagccataagaagaaggcccatcccaaggaattggctgcgttagaggcctcgggagagcaatcaagggcgaccaatattcctaaattggaacaattgcagccaaaaccacatcaaatggcatcgcttccgggtacacaaacagctccacccaccgcaacggcactgatccaacaactaccgaccagcgatacaagcaccactttgttgcctgcccttccagcgtccaccgcaagtcaacaacagcagcatgagcagcaagcaacagcggcgacgataattgccacctctgcgcgcccgccagtggaagtaccgaactcggaggaactgctgctgcatcatggcgtccgtttggttactgcctactttcattcgcaaaacgagccacccccattgaacatcctttcgacggcaaacatcaaacacggtattgcagctgccatcggcggacgacagactgtcacggatcagagtcgcggtttccaaccactggtgatccggcagcaggaaccgagccctgcagtgacaccgcccacggaacaaacccagctgaccgtgtccgatacggttagccttccgccgctccaactcatttcgaccaacaatttgtgagctgtaactgtgcaactcaactgcttagttgtggtcaagtgggaaagtaatgggttatagtttttttacgtttgtctcggttttgttatttcgatttaacgaaacaatattgctaagttttattaattgtacagtttagttcaaactaaaacctc

SEQ ID NO: 1599 - DNA, 1122 bp, Aedes aegypti
atgtccagtatgaatgccgatgattttcagcaccacaatcgatgcgagacgatcacaataccgttctgtacggatattcaatacaatagaaccatcatgccaaacctgattgggcacaccaagcaggaggaagctgctctggaggttcaccagttcataccgctcgtcaagatagactgcagtccggatctgaagttctttctttgcaccttgtacgcacctgtttgtacaatcctcaattatcccataccgccctgtcggagcttgtgcgagagtgcacgagtgtgtgaaacaattatgaggacttttgactttccatggccagagaacttggaatgtagcaagtttccagaggatggaaaagagctgtgcgtatcgcaaaacacctcgtcggaaagcacaccaatgccaacaagtgcactgcaccctacaaaacctcatgccccaagaaagaacgttcatgctggagccggcatcggaaatcatctaggcaacagtcatcgagatctaggattcatctgtccggtccaattgaaggccccaacgattatgggctatcagttgacagtaggaggaaaggtcactaaagactgcggtgcaccgtgccattcgatgttcttctcggagaacgagcgaaccgtgctcaagtactgggtcggttcctgggcggcagtgtgcgttgccagttgtctctttacggtcctaaccttcatgatcgattcgtcccgcttccgctacccggagcgcccgatagtgttcctggccatctgctatctcatcgtggggtgcgcttacgtggccggactcggtgccggtgattccgtggcgtgccgtgaaccgttccaaccgcacatcaaactcggtcggatgcacatgctgtccaccattactcagggtcaccgccagtcgacgtcctgcacggtcctgttcatggccctgtacttctgctgcatggcggcgttcgcctggtgggcttgcctagcgctggcctggttcctggctgcgggtctcaagtggggtcacgaggcaatcgaaaaccgatcccatctgttccacctggtggcgtgggcgattccggcgatccagaccattttcgtgctcgctctcggcaaagttgaaggt

SEQ ID NO: 1600 - DNA, 1038 bp, Aedes aegypti
tttcagaaagaacttcgctcctgcacggcatgcggtgagcccatatcagacaagtacctgttagacgtaggcggttgctcctggcactcggcctgtctccgatgttgtatctgccacaacccgctggatcatcaaccgtcctgttttcttagagaccgccagatctactgcaaaaacgactacacaaaaacatttggagcaaaatgtgctcgctgttgccgaagcatatccgcttcggattgggtgcgtcgtgctcgcgaactaacattccatcttgcctgttttgcctgtgatagctgtggacgacagttgtccactggggaacagtttgccctggtagacgacaaagtgctctgcaagacgcactactcggaaatgttcgactgtggaacgtctagtgatgacggctgtgaagcggatggttttcagaagagcaataaaacgaaacgggtgcgcacaaccttcaccgaggaacaactgcagatactgcaagcgaacttcaacatcgacagcaatcccgatgggcaggatttggagcggatagcttcggtaacaggtttgagtaaacgggttactcaggtgtggtttcagaactctcgtgcacgtcagaagaagcatgttcaagttcctagagatggtgatatgaaccctttcagcaggcacatcaatctccagctgtcgtatacatttcaacagtccagtatgatgcatagtccgattcacatgggcgctgtgggaagtgttgttgggcataccggtagtataaacaacagtagcaataacattatggccgcagcttacaacaataacaacaataatacaaacagttcgtcaaagtcgtcaccgtatagtagaaacgaatcatctttagacgagttatctgaggattccgctatccattgcatgcaaaatgaaatgtgaaatattatttatttgtaaatgtggaaatatttattagaaatgaataatgtaaatttacagcctaatatttatgcatattaaaacagtgattaaatttattctattgacattcatatt

SEQ ID NO: 1601 - DNA, 921 bp, Aedes aegypti
aagtgttatttaagtgatagtgaccacgaagacgaaatcctggtgcctgaatcaaatggagattcccacaagattccacatcaggcagaacctactcttcaggatggacaccttgatgaatcgtctaaaaggctagccaatgcggatccatcgcccaacttcgatgcagttcactcgaagagcggcatgcagcttcagatggctccgaggacgaggatctcttagtcgactcaggtggaaatttcaccaatccaagtgctgagaaaaaacggaagcgaactacacgatccggtcgctattcgacaaagagtattttttcacccattaaagggtattcgcaaacaaccgtgtaaaaaaacaaacacaaaggatggcagcaaagaaacgtggacttctgcctccagtcatttttgataactgtagatgtgcaagaggatgctcaaaaacagtctctgaagacgacagaaaggatgcgaacaatttttattggaacctgggtgctaatgctcaagttggatatatccgtgaaacggttaaatgcaggtatacaaaacagcgagcaattcagaagcatggcgagagtggtccgcgtaagaagaacgcatatgaatattaccttcgaaccactctcgtaattcgtgaaaaaatctgccgcaatttttatttgaacaccttaggttacaccaagcatagcggcaacatgctctaccgcctcgtagatggagatacattgaatctagtcgtgggaaatatccaagagattcttcgaaacgtgacgcgattggagcgcatatccttacgaatgggaattaggggcataatggacacgtttagcaaatattcgttttaatactataaaatggcaatgttttaaatataccgtcggctagttttcaagtttgatgttagtacgaagtgcta

SEQ ID NO: 1602 - DNA, 1374 bp, Aedes aegypti
atgggtgttcgccatttggaaacttatgtttgcactgaagtacacaacggttttaacagagttaacatcgaggcccagatccggatacgaggactagatgcagcctcaccggttatcgttatagacctgatctccttgtaccgtttgatgaatcttgctgatctgcgtggattgttgtatggcggacgattcaatcaggtggccaacttgctggaaaacttcttcgccaagctcgtgaacctaggcgccaggttggagttcttctacgatggaccggtccaggacaccaagtacgatatctgggccaagcgacaggacgagaagtaccacaaaatgctcgaaatcatcaacgtggatcgtggttcggatctgggttggatcgtcaatcgcttgcaacattccataccgaacaatactttatatcctacccggaaaatagcaacaaagtacggcgaggtgatggcatccgtagcgatggaacgacaccgacttcatgatctacaagggcttctggcagtactggtcatccaagtcgtcaatttcgaaaccatacacaccatgcagtataaccacgtagaactggttcgaaacttgggcctgagcctcaagagcactgcagcactgaatgaattgttgggtcgggtctttgggagggcagccgtcaacgacgatctgaaggaacacttcaaggccagtttggatttctaccaaacggaatacgaagatcaaaatcccaacgtctcaaatgatccagtgattgatttcttgctcaaactggagaacacgtacctgtaccggttgtggatcaattggcccgttaatgtgaccgcatacttcttagatatgcgaaaaggcgaattcggcgaacagtatccgaatttgacgatttcgatagttcttcgccaggtgggtatcattctgtaccacaagcagatgctctcggattgctcgacccgcacgattgtcatcaaaatgggtcacgaggctgtaagcttggaagacgtgaagctgcagctcttcatcaggatagctcccgataccttggactatcatcggctgaatctggtattcgtggaaaagaagatcctgcaattgtttgaggcgtacatactgctgcaagtcgtccacaatgtagcattccaaacgtacaactgccaatccgttcggtatccccataagttaggcaaaaggcccttccgcatagcattcctgtttacgaggatctacattaatttcagcaatgctagcaccttactgggcttcaaggaagaatcgcttctcattttcgatggagtgcttttccataagcggtacgaggaattgacgaaacgagcggcctgtatttgcttccgtgaactggacagcgcatcttag

SEQ ID NO: 1603 - DNA, 1851 bp, Aedes aegypti
cgtcaatgcgattcatctcttgaatggttgctctttatggcaaacggctattataccaaaacgggcatttttttacattgtgtcgccctcaaccattttcgaccacaaaaccgataccgttgtcgcaactccgacaacaatgttgtgtcaaaacaatctcgcgcatcaaaacattttagcatttttctgccagttgtctcatcagtggcgatgaacctcgaacaaatctgtcgtctttgtgcggcggaaaagctcaagcttagagacatctccggcgacgaacgccatgcccagctacccgatcagctgagaaacattctgcaggttcagtatgaagagaatgacgggctcccgcagaaggtgtgcaagccctgtgtgaccacaatgcaaaagattcaggacaccctggacgaataccgcaccaacgacatgcgcatgcgaaagcagcttctgggactggaagaagtcgaaatcaaattggaggacttggacgaaaatgaggacaatgtcctcagtttgaaagtcgaggttcttgaacagcactttgcgctgcagtcaccagaggacatcgagcaagctgaggaatggctggaggaagatttcgctgacgaagctagcaaaactgtggacgaggatgttagtgaagtagtagcgccaacaattgaggctaaggaggatgctgcggaagtgtctgttgaagataagaagccgcaatctgcgaaaagaaagcgagctagaagttccaacgaaccgaagaaacagcgtcgaaaacgaggaattaagacgccagaaaatccgaatcgaccacgattgaacgactttaaatgctacatctgcaaaagtgatccgctagggtcggcaaaagatttgctggatcacttggcaattcacaacgatcagttaccgtacacatgtcccatgtgcattcaagaaacggtcgaaatcaaacaattacgctccctgaatctccacttgaagatgcacgaacagccaataaagtgtgcatattgtgatcgtcgttatacgaatgagcgtgctcgagattatcatgtacaatcgttccacttaggagacaatgctccctgtccgtccacgtgcgacatgtgtggcaaggtatgttcttctgccctgtcgctgagggcacacaaaaggagacacaccatgtcgttcaattgtgagtactgttccaagggattcgccgaaaagtccaaactcaaacgacacatttcacgagttcacgaaaagaccggcagttacgagtgtacgatttgcctgaagcgcctcacaactatcgacgcctacgagcaccatgtccggaccatccacgagggccgcagggaccacgagtgtgagatttgtgggcggacatttacgacggctgccttcctgcggatgcaccagaagcactatgagggcggagtttgcaaaccgaagaacaactggactccgtactacaccactcgaatcaacgaggaaggcatcaaactgtacagctgcaaactgtgcaagaaggaggacatgcgtgcgattagcgaacacttgcgggtgcacttccccgaggagtacgagtgtccgatctgtatgattaagtttccgcgtaaatcgtcctacgaccggcatcgactgacgcatagcgaaattactcaccactgttacagttgtaagaagagctttctcagcccccggaagctgtccagtcacctggccaaagcgcatggcatggggcagatttcggagacgaccgaattgccgttggtgtccgatgaggagttggaattcgacgttgtagattgagcgagcggtaaacgtaaggtaagtgtcctaataataaattgaatgtggttttataaa

SEQ ID NO: 1604 - DNA, 1056 bp, Aedes aegypti
gagctgcaaggatcaaagatgaacgaaggataaaaagatgtacaaggacgcgtgtgccggctagtgcgtgtggagattttggccagtgaatatccttcccagtagtagagagaagacgagtcgtttcattcgggtgtaacgatcgggaatgacgtcggattgcaagaatatggcccaaaccaggcaaagtgatttcagtatagagcacattttgaccaaggctggagagaaatacgaaaagcgacggagactggatacgttttcgtgttcgtcgagcacctcgcacagccatagtgacagtgatgagccgttggggtccgaagaggatgaagacatcgtggtggatagcgtgcagaagagcgaaagtaaccacgcaacgggatacttgcagaactgtatgccaagtttcgattggctgtattacacgcgatatcgaccaccaaaattaccacgtccccagaaagccggacccgtcaaacgaactcccggcagattgccgcgcgtcccgttcacccccggtcagctgagtgccttggaagacgcgtacaaaatgtccacctacctgagctcggaagaagccaaccagctggcgtacagtttggatctgacgaacacgcgggtcaagatttggttccaaaaccgtcgggcacgggaccggagggagaaacgtgaagccgccctcggcacgacgacgacgacgacaaatggcagcgccggcgccctgacgttaaccacagctgcggctgcgctggcgccggtcggccactttgcatacttcagtgggcaatgcgagtttgcgcccggatcgccgccaaccggctccagtggaaccgatcggaagaatcctatgtagggtttcgaatttgtgatatatttaagttgaaatctgttcactgtacatattaaaatatagaatgaagactaatttatgtaaatgtagaatagattaagatagaatacagaaatatatttttgaatataaaaaaaacgatcggagaaattgtttctatttttggtacactactaccacaagtcaggatggccgagcggtctaag

SEQ ID NO: 1605 - DNA, 3339 bp, Aedes aegypti
atggacctgctgaagcacaacgattggatcaacttttccgagtacgaatacagcgacagcctgatcccgaagacatcgcaagcggtggtcgacatccagcagttcgccaacaacaacctgaaccgtacgatcgagaatggcgtcttccagaacccacgtgcagctgccctgaaggcccgtcgtaactccatgagtgacaacctgtacgctccctcttctatcagcgggtacgaaatggtggacaaactaaaaccttcgaccttcaccatactgggtcatggtatgacggatccccggttgtacgatggatcgtcaatgtacttgggcggatcggacattaccaattcggcggaagccatgagcgagtacgaacggatgttgcggtatcacaagctcgatgcaacgaaacctattctcacggataagatcacaaccgggtccaattttagagttcccgaaggacgccaacacaagaagcctgcctttacaatcatcaacgaaagcctgcccaaatcgaactcgttcgacacctccacgggaccgttcctgccttactcagccaaacaacagctgcccacgaccagaatcctatctgccagctctgttggacatagtgccttcctcaatacccgcggccgtcagttgagcatgacgtccgacgatccgtttctagcgtaccaacgtcgattcagtaacgcttcacaggtttcacctacgtccacagggaaacgccgaaagtccgtttcgaagaaaagcgccggtcacggcaaaaagtccaaaagtaaaaccgccaccgctaacgttccgaatcccaaccgaaagcagagaggagtgctaggtatattcaaccgagcgactccttcgcctacaaaacaaccgaaccatgtcaaaagtgccaaactagaagttatcgcagcttccgatgacggacaatcgtcaaccacgccgactgaaacgaccgatatgatcgaaatacccgagcatcagctacgaaacttgaagatgctctcctacaaaccatttgctctacggccgacgctctctcctgtgcaagacaagagttcaatggaaaactcgcaaatcgacttgaaggatacttcgccagccaaagagaagggtggatatttacgaaccccagtgttcaacatccgtggtttgctgtctcctgggaagttcaaaagcaaaggtgaatcacccaccagacccgaaaaggcaggtttgtcatctgtgggtgcagcaatgaatgcagccatggctgccgcagctgtaggagacgttaagcgagcggatagcaaagaacgtcatgaaccaccgaagcgaaggggattcaatctagccagagccatcattgactatggcaagaaatccgatcaagaagaggagaaaaaggccaaaccagaacctccgaaaccgaaaccggaagttaagcgggacggccgtcggaaagattcggaaggcaatcgtgtgaaagacaagaaggaaagtccaaagaaggcgactcctaagaagaaagcgaagacgaaaaccacggcgaagaaaggcggcgccaaagacgattacgatgattactactacgaggaagacgaaaaaccaaagcgtgggatgttgagaggggcgttgaacctagcgtcgagcttgagaggtggcagtaagaaaggaacgacgaaagaacccccaaaagccagtcgggtagcgagtgcaaaacgaggaggccagaaaagtgcaacgatgggtgcaggaagtagggcatccgcaggagtcaagagtggtaaagcaaacgaaagaactagccagcgtgctggagataatagtgggaaggcgatgcccaaggcaactccaaaatcggcatctggtcccaagggaaaaccgttgaggcgaagcagttcgactagcgccctgaatgtagatagcgttaagaaattgaatcgattgtacgagaagaatgcaaaggcgggcgatcgcaacgggaaaatgctgaagggagacaagaaaacccgacaatcatccgacagtctgctgaagaagtctgacagtagaggagaactgaaacaaaagactggaatcaaatcggctacggagaaggaaatcgtgaaacgggactcggaaaagtccttgaagaagagtgatagcaacaaatccatactaaaattgggcaagaagagtgactcgaaggggtccctgcacggcaaacgatccgattcgaagaccagtctccatcagactgaagcaatggcatcgatggcagcaggctcggtagcggcggccatggagtttgcaggtaacagcggagggcccaaatcggatgcagagtcgctgaaagctgctctgaatacgttgaatgaggcgaccgctgatagcggaatgagatccaccaaggttacgcccactccccataggaagctgcaaagtaaaggatccttgttaagtttactaagcatgaaaagcactacccgtaaagcgcacgatgtcgaggctggaatgggagattccggaggaaaggattcacgtcccggtacggcacaaaccggtgtaggccggttgaagtcagcatccgtgagaaatatgtccgcgaaaccgggtactcctaccggaacagaaggagagtttggatcgcaaggcagcattcgagagaagccaggcagtaccaaacctcagcggaggggtatgctgagtaaaaccaatagttcaatttcaatgaagagcatcgtccatgctcgatcgtttatcaacattcggccatcgtcgaagaccgatgatatgaagaagatcgattcgatgcctcagatgagcaaagtgcaggaaggttcccaagagcaagacgatgccgacgaaggattgaccatggcgatgagaggaggtggaggaggaaccatgacgacgacctcggcaacgcatacgatgacagtggccggagtgggagagggtgagaaagtttccaacgagtacaacgaacagcgagctaaaggacaatcgccagaaacgggtgccggactgggcggcggcagttcgaagatgatgggaaatgaatcaagtgccaacaccgactcgatgatgatgcagcgacatcagggcgaggaggataacaggtgagtttggaatggattgtgcggtgactgatgatatattttggcagctcgtcgcttccggttgagttgatgtctcttttctaaaaaggcggagcttatctccatctcctcggtacattgaccgataaggagtgtatagagttgatgaggggacttctacagcagataagtaacaaaaagattaggcatgtaggagggaatactcttatgcgcacacttacatggagaacagaatatatcatttgtaatcggc

SEQ ID NO: 1606 - DNA, 2994 bp, Aedes aegypti
atgagcgatacggcaaacgacgatagttactcgacgactacagaggtgcgcaatgcggaggtcataagctccgatgcagacgatcggagtgtcatcatgggaggaactttaccgctcagaggatcgtccgcaacgctaccaacgaatgtggctggtaaaaaacgtcgctgcgttagcaccctggagggggtgatcagcactaagaaccacctgaagctagtcagtaaagagttggactgggagcgcaagttccgggatgatcagctttcgagaatactgaaagcgttgatctatttcgaaactcggctcaagaacgagcacaagctgatcaagcagcaactgcacgagaaggacgacgtgatcaatcgacagagctgcacaatcaatcggatgaaacggaagctcggggaggacgccaaaggggaattttccgacgaagatctgccggacgtggcgcagttttgtccgaagtgtcgcaaatgctactatggggtagagtttcgctgcagtggaacgcaaaccgtagagtatcgagacgacggaacagagagtgtgaatacggagaatctctcgctgaacagcgtggagtacgcttcgtcgagcgaggagcaggactcgtcgctatacgttcgtgccaattcgttcaaggatgctcgacgcagccgcaagtacacgagcaaacggtcctaccaaggatactcgcgaccttcgcggaacagtagcttcaaaagtaccaccagcagtatcaacgggagtaagttgcttgggttgggactcggtagcgctgccgtagcaatcgaaaactacgaaaacatcgaaccaaataagaatgtgcctaaaattgtgatctacgaaaactacgaaagcgataaggaaaataaagcgatggtcgacgatgcgaataattacgacctggttgaaccgtcctactcgaataggatggagtcgatgcatggaattaaaagtaacttgaaggcgagtgaagacaacgatgctaggctgctggacgacgataacattatttatgaggaagaaacgagtgggaaacatcccagcagaaatcagcaaaagtacacagaaggaatggaaatgaagcaaactatcgaaaccaacgacgattggtatgcaagtgccagcgatatggaggactcggattcagctctaggaaagccgtacagcaatgctgctgtaaatcctgtgctggaatgtgttaatcagatacttcttcaacaatcgatggatggatttggagagaaaaagggcgcgtccaacgaaaacgacgatgatatgtacatcaaagcacaagagccaccaaaagaaccaactcaggttcgatccaagcgtgtacatttctccactcaaaacagcatggttcaggttccgcggatcagtctacaatcgacaccggtatcccgtaaggaagacaaggcatctcctacatacgaaattcagagcatttacagcaacgagtatgaacccattgggtcggagcagaactcgtattccaactattatgtcgatatggaatccaagcttggttcggaagatcgtgaaagagaactagcagcagctgagaaacgtaaaattccaccggccttaccacccaaacctgccaatctaatgaaattacagcaaatatccaaacaacgaatggttcaaatcaaaactaaaccgacttccggtaacagcgatatcgccgagtctgaaccggattactgctcaatcagtgagatacaggactcagtcaaatgtgttcaaatagtagcggagattcataaggaagcctgcgaggacgattactcggttgttgatgaagaaattgaggaaactgaaagcaagaagagcactgatccggaggaatcctttgcagacgtgcccaagttgccaaacgtgactgaaattgtacccccgaagaaggaacccgccgctaagttcataagccacgataactacattacaaagtccaccaaaggaacaccggtgaagacgaaaggaacccctacgaagaaagatggcgagttcagagaacagctatcggagattctggcagagatcaataagcagtccccagcgatacgaaatgcttcgaaaaaacacgtcccagtcaaagatctgggtgtgggattcaaaaacgctagcaacattccaacattgggttatcaatctaagctgagatccgtagacaagatgagtttccttagcaagatgaactctgggtccttgtcgaatcttaacatgagtgtaaaactcaacggatcactgccgaaacccagtaaaccccttgcattcaaatcaagcctacagtcaaagcctctgagtacaaatctgaattcttccggcagcctgaaccaactgataataaccagccccagcaaaaccggatcattcataccgaatttgaaatctcccggaacaccaatctcgcagaatggatcatctccaaaaacatcgccggtcaaaaagtctccggcgccccccgtaatcatagccgaggacagcaaactaccgctacaggctgagttcgactggtacaatttggacgccgagtatggcaaatccaaccaaccggacatcatcgtcgaggccgactccggtaacgcatccgagacgcaaaccgataaaactccggatgaatccaactcggtcaacggtcacagttcggaggctagtggaagtgacttggaaaacgtggaatacaacctagacgaggcatacaaatcgatgccgccaatcgtgcaaccaccggacatcatccagaagaactcgtccatcgctacgactccgcctaaaaacggcaagatcccgtacaacagtttgtcgttcaaagagctgatgacgttgaacgagacgcccaaaatcgagaagatgaaatcatcctcggttgatgcaaccaatgggaactacgaacactttctggacgattccgggctgtgctcgaagccgatcatcctaccgcgaaagaagcgcatgtactactcgggtccgtttgtgtaa

SEQ ID NO: 1607 - DNA, 1119 bp, Aedes aegypti
atgtctcagtggatgaaaataccctgcctccacaagcatttgcagttgaaaacgactctcaccggaggacagagctttcgttggaacaagcatgactcctttcaagacgaattcatcggagtatttgcaaacatcgtttggattctgaagcaaaccgaaaccgatttgctgtacaaaatcgttggtgaacttccgtatcctaatccaaacaaccaggaccacgttagtgatgtcaaaaaacagaggatctcagccaaaaaggaaaatctcgcgcaaatacgtctcaaagtgccggaaccggatcggtatgccagctgcgggaagctactctatccgcaaagctactacgagtcgttactgcgcgtgtactttcggttggatgtagatctggaacggtgctacgatcagtggaacaaatgtcacgtccacttcgagaacagtgccgatcagttctatgctgtccggcagctcgatcaggacccggtggagaatctgttttctttcatatgcagtcagaacaacaacatctccagaatttccggcctcgtagaaaagatatgcacccactacggtgataaaatctgcgagtataatgggactaccttctacaacttcccggatgcgggtaagctagcctcgcagcaagtggaggaacatctccggcagctgagcttcggttaccgggccaagtacattcagaagtcggccgatgaaattctcgccaagggtgatctcgagtggttccggaaactgcagcagttggactacaaggaagcgcaccgagagctgctaacgttgaccggaatcggtcccaaagtggctgactgtatttgtttgatgtcgttgaaccatctgcaggccattccggtggatacgcacgtgttccagattgcacggaactacctgccgcatctggccaaatgtaaaaccatttccggaaagatgtacggtgagattggggataagtttcgcgaggtctatggatcgaatgcgggttgggcgcagacggtactgttctgtgccgatttacgacaatttaaagagaagtcgggtgatgtggacaatgggaattccgaagggccgaaagatggtcagaaaaaaggtaaaaacaagcggtag

SEQ ID NO: 1608 - DNA, 1194 bp, Aedes aegypti
atgcgttggttcaaagtgcacaattatttcgaatccctccgaccgttatacttagctataaagctgcttcacttccactttgaaacaatcgatttcagtacacaaacgctacatcgaacactaaccgatcagtttcgctttgtcttcacccttctgttggactgttacctcgtttacaaaggtatacagagcacgtcgacctatttctacctgacggattccaacatagttaacgttggatgcttctcggcgtttatcctagtctttttgttcagtctttttatggccccaaagtatcgactcagaactcagggtatgtttgaaattctggcaaacatcgcggagctcgacgggcagctgagatccttagggctccacatcgatcaccagagacaccattttatatccaccgtgagcgcagggctctggatgaccatgggtctatttgttcttataatcactggaaccaatcgcaccaacgaagattggctcgatttgtcggagatgttccctgactggatatcgatattggccatgtgccgatcagcaactagccttggcatattcacgtgttacatcactatgaccttatattcgctaaaaaccggtttcgatcagctacaccaagcgattgcgaaacaccttaacactacaccccaagcgatcaatcgcatcccacgaacctctcgccaaacatgtcaagttgttcagaggatcgcaagtttacacgatctactgagcgatacagtagaactgttcaacgagtgctactatacccaagtagtgcacgccctgactgccgccttcaatttcaccatcttttccatattcagtgtgatccattcgaatgccggtcaaacggacgaagtcacgcttcgggtaacgtgggtcaacgccatgttcgatggattctttgtggtgtacacactgcagctgatcgtggcggccagtatcgtcaacgaaacgtgtaagcggtcgtcggtaatgatccataaggctgcagcatatggaaggtacgatcgacgggtcgtcaaagagttggggactttctcgtatcaactgtaccatcacacgccaaaagtctcttgcagattgttcgatctggattggacgctgttgtacacgatggctggatcttttgctacatatctggtggtacttttgcagtttgatctggccaatctgaacggtatt

SEQ ID NO: 1609 - DNA, 1040 bp, Aedes aegypti
ccgaaaacaccacaaagaaaggtgcacttgtgatttcgtccgatcggttctgaaattttcagtaattttcccggattttatacgcgctaagtacgccagaaccacttccggcctctcccatcagctgtgattcaccgttaaaaccgtcgctaaataatggccgccgcaacacaacagatgaccagcagcagcagcagtagcagcgcaggaaaaccaaaggacaaaaaatcacaggaagaaatctatgccgagtttcagcagctgcgaaatcaacagaggaatttaattaacaatctcaacacgctcgagatggacctcaaggaacacaaaactgtgatcgatacgctgaaaacggtggaaccgggtcgaaagtgcttccgtctgattgggggcgtcctgtgcgatcaaacggtcgaaatcgttctgccgcagctggtgcaaaacaaggaacagctggaaaaactaatcgagaacggcaaggaacagatcacgaaaaagggtctggaaatcaaccagttcaaggatgagcacaacatcaaaattcgtggccaggatgcggctgcagctgccagcagcgaaaaggaaaatgccgacgacaaatcgggcgcttccggaactcggaatgtgctggtgggaaatttgtaagaccaaaatcaattatcgtttgtatcttcttaaatcttatcctcactcgagatcccttgactggtactaaacgagaagggcgtagaatttccttcggttgtacgatttcggtgttttgctcggaattggccgtgatgctcccacaaactagcgttttgatccaactcgcgccaggggaataagtcaaacaaagcgagagcgccgttccacacacccataattattgaaatattatttatcatcgttcataacttgcaatcgctgagaaagcaaaacgtttaaataactctagaccgattagttatcccggttaacacgcagattttagattactctaattgctattatttctttgttcatcaactgcttgaataaaatacttactaaggacatgt

SEQ ID NO: 1610 - DNA, 1809 bp, Aedes aegypti
gataaagtgaatgtcagataggatgatttgtagaatttaagggagcaggaaaattgtttaccagctaatattgttatgctatatagtgcagtgttgaatttcggagttatttagaattgaattttgatacaagtttaaaagtaagatcacattgaatttaaaaggctccaaaatctatataaaaaactaatttgaactcacagctaatagtacggaaaaaaaacagaattattacggatgaaatccattatttaaccttaaattgaagtatacaaaatagattgttctgaaatcgcgattaaattatcagtgaaagacgagaagggatgaaacacgaatagtcaacgaaactgatttcgacatgatagaattattcggttcaccggctggaagagcattaacagtgaataatagaacagctgccgaaatgcagccatgtagtaaatcgaacaacagcaccaacagtagtagttccaacattgccagcagcatcagccagcaacctcccctcagccaacagcctctgtatcatccacttcataactgcggcttcagtggaacttgcagtaccatttgcagtgttggcctcaaccataaccatacgaacccttcaactgccagcaacaacttcgtcgaaaccagcgatctaataaggtacagatccaacaaccatccccagctgcaccaccatcagactacgaactacagcaacaacaatggtcggacgaactcaaagattgccaaaatatggaagcttttcgatgaggaccgaatacgcaaaaccagcttaggcagtagcagcaatcaccacagcagaagcagcacaagcacaaataccggtattagcgggagtgacatcttcagtcgatgtcagagcaccagaaggaagtccagctcgatccaaagcgaggagaaatccaccaaggacctgtacaacgaagcggcccaactgcttggcatcaagtgcacactcagcgacagctgtcgctgcattgattgtcagagccaatacttcgactgtgatgatttcgattcgtactcggaatattcggataaatcatacgacacggaggacaatttcgccgtaaatcaatcgtattactgttccggcggcaacattcagagccaacgacagcacgaaatgatagacgtctgtcaccatgatgacgaggaggaacaagacgttgttggctccactgtgcattcccaagtcaccagtaacgaatcctccagcagctatgccaatcagcagcgccatctccggggagtaaacgttgccaatgtgcgtgatggtgatgaaaatgaggatgacaatggtaacaataaaaatgatcaatatttactagacgacgcgtcccacgagttgccacatccggtgggaggaaacgttcatataaatcccacagtttcatcccacgctgctgctggtggaatccaatgtaggaagagtaatggcgactgtgagatcatcggaccaacgaagcaacagataaggccgtcatcgccgggggatgatgttggcccatccaattccggtcgagattatgcttctgccggggaaattaacgaaccggaaacgaatggcaattcgatagcatgaaaaagatgtcacccgtcgactcccatggtaatccagacacaaagagtgacaactgtcgataaactcgagtgacagagccaagtcgagcgaaatttgtggtcgacagtgactccagtcgagtccaagcttgaaaggcccctggccgaccaatttagctgtaagaataattgtacccccaaatcaaacatgaaataaatacgaattaaacc

SEQ ID NO: 1611 - DNA, 2002 bp, Aedes aegypti
atgaaggaatacactggtccaggcggtgccgaccaggaactcgataaagccaccaaagaagagtacaaggtggcaaaatggctcaaatcgaacgtaccgaccaagaagaccaaatttctgaaccacaatgtggaatatttctcagcggtgcgggccgtcgatgccctgatggcttcaaagtttgcccagggtgacaattgcatgtttccccaccgtcaggcggtactcgatttcatggacgaaatgctgcaccacaagtttttccatcgcgccaaaaaggttccggtaagcgaacaggaattgcgcggtaaaagcaagaaatccgacaaggaacccgagaaggaaaagcccagaaaggacgaaaaaacaaccgatggcggtgaaagtagccacgctgaaggtggcaaaggagataaggcttctgcggacaaagaaaagcgcaaacgcaagattcggttggaaatgcatccggaacagttgttcgtcgatggtcacgaagcgtacgtctggttgtacgatcctattccaatgcactactggatctttggtgccctgttggttgtcggagctatcgtcatatgtctgttcccactgtggccacctatgctacgaaagggtgtctactatctcagtatagcggctgccggctttttggtgtttattctaggattggcagtgttgcgatttgtccttttctgtattgtgtggattcttaccggaggcaaacatcatttctggctcttgccgaatttgaccgaagacgttggattcttcgcctcattctggccattgtatgatcatgaatacaaagacggaagctccgagaaggacaagaacaaaaagaataaaaaacgaaagcgcgacaaagatagcgatgccgaagacgaaggcacggctgcggtaaatgttccgcagaagatagaggaaactgcggaacctgatgccgaacagaagaaacaggaatccgaattgcgacaccgaggaaagggcaaaacggctgtcgctgctgaaaaggtggaagaaacaacaaatgccagcgatggacatgaggacgacgaggaaaacggtgttgatgaaaaacactcaccatcagaaagtgaatcggagagttcacaacggtcctcaactgggaaagatttcgaaatgttggaccatgaagaggtagaaggatcgtaaaacacagcaacatcccaacagaacctgatatcgcagacaaacagataagttaatatgataacaatgatacaaacatttaaaatggcacattaggtgaactgataatacgacaaccgacatggataactggtatattgacatccactagacgcagccacactattattgtatttataatttatattttaatttgtttttaatagttgcaacaaattgagtgaataaattagaacacattttcaaattgtaatttagtactacaatgatttgggtggttattggaaccggtgcaacttctcatgtggttggagcattatttgctgcttcattaaagttgtagaattcttaactacggcagatatccatgcaataggcgaacatgaatgaatctacaagtagaaactaaaaaacatatacgaaaactgcagaaatgttgaaaccccttgaacatggtcgatttatcaaataactaagaataattatcaatacgtgcatcgtttggcattttagatgggtattacttttcatcacatattataaggggaagcgtacaaacacattgaaaatgcaacaaatgattcaagatttattccatcctgctttcttgttcgacaaaaataaataaataaataaaagaaacaaagtaaaaaacaaatttatccaggatgatacttttgcaaaagtagacacgaaatcatccctgtactgataacagaagttgcaatgaaaatatttaattgagtagtaaaagatgagttttgaaacttctttgtgcaagcatcggtgatgcggaaaataaataaaaatatatatagacattgaaaac

SEQ ID NO: 1612 - DNA, 297 bp, Aedes aegypti
atgaccataggcgataagcttctttactcgttccggctacaaagtggaccgtatgcggaagccacagatatcaggctaaccttcgattatcgagtcgaagatttaattctgggtcgtgagtttttaaccattattaactttactcgaccagatgatgatctgttgccgaactacttcgaacgtgctgagctaaactctacacacttgttcatgacgcctgtccgaaggagtgttaccagctggtggctgcagggcgatttatatggattcaatgaggagctatttccatcgaactga

SEQ ID NO: 1613 - DNA, 450 bp, Aedes aegypti
atggaaaaagggaaggatcaggaggataagcgacgaaaatcaaagaggtcatccgtcgaaattggacactcagctctaatgcaaaatctgctaccaggtaataagctgcagacgacctatatgcccaaaaactacgttgtggtttccggatctggtccacgcgccaccgttgaggatcgtgaaagcggcaaatcatacgatcggaatgtcgcacatcttaaaaagcttaaagatcccgttgttcctcctacatctttggacagtggtgattcaacaaatgaagctaacagcgagctgaatgttgcgtcgtctgaagatgagttctacgggttcgaggaagaattgccatcgaagacggccggtcaatcaagctattacatgatggcttcatctaccataaagactaaatgcgttgccagtagcactgttaccgtaaggatgcccaaatga

SEQ ID NO: 1614 - DNA, 742 bp, Aedes aegypti
ctagtggcaattcaaataaattagttcggtattgcaatagtaggtcaaattaggaagctatcgccaaacgtatccgttagtcacctaactatcaagccaacttagattgaaaagttgcaaccaacgatgaaacggccaacatatgaacgagtctttgtgactgtcggaacaacacagttcgaagacctgattgatactgtcacggactcgccggtggtagctgagctacgtaggatgggctgtaggaaattagtgctccaaataggccgcggcagaaacccacaaataatcaaagaagtttttggaaacgacatcgaagtgagattttacgacctcaaggccagtatcgccgaagacatccagcaggcggatttagttatcagccatgccggcgccggaagctgcatagaagtgctgggagccgagaaaccgctcgtggtggttgtgaatgaaaaactgatggacaaccaccaaacggaactggccgaccagctgtccaaggagggatacttgaagtattgcacaccgtcgactttggcacaaactctggcggagagcaaccttggacagttgaagaaattccctccgggatctgtgcaagatttcatcagttatctggacgcttttatgggattttagaagtaagactccattagatgctttatacatatttattatcgtaggtgtttccaatacggttaattatgatattttcaatatactttttatactgtttacctac

SEQ ID NO: 1615 - DNA, 1312 bp, Aedes aegypti
gaatgcggttttttgcatcgtttgctccggtcgtttgctcggtttgttgatcagtttcctagaaaattcaatctttcgataaattttcagtctcttaaaattgatagcgtctagggaactaaacataagctccggcaaaatgtatcctcaaagttcgcagaaaaaatattggactttcaaaagcgaacaggaactggcggaactccggctgaaacagaactacaatttcattgcccggcatggagtcgggatgtctgaagaacaaaaaggagctttcttcctatcatcggacgaggaacggcttttgctcaaacagtacgagcttcagctgaaggaattctgcaaacggttcgagcctccaatgccaaaatacgtcgtcggaacagcgttccattatttcaaacggttctacctgaacaattcgtccatggattaccacccgaaggaaattttggccacttgtgtgtatctttcctgtaaagtagaagaattcaacgtttctattggccaatttgtggccaacattaaaggagaccgcagcaaagcgatggacattattctgtcgaacgagttgttgttgatgcaggagttgaattactacctcactgtgcacaatccgttccggccaatagaaggatttctgatcgatattaagactcggtgcaatatgaacaatcccgataggcttcgaccaggcatagacgactttatagataaaacattcctcaccgatgctcccttgatgtacgccccttcacagattgctctggcagcagttctccacgcggcgagtaaagaacaggaaaacctagatagttacgttaccgaatcactgtttggaacagcgaaagaaaagctcccagttctgatagaagccgtccgaagggtccggtcgatggtacgcactattgagctaccccagaaggaacgtgtgcgtgccctcgagaaaaagttggaaaagtgtcggaaccaggaaaataacccggacagtcaaatctacaagcaacggatgaaaaagatgtacgaagatgaggatgatatcgagctgatgagtacctcgtatcacatgaatgccaccgacaccagcctggaagtttcccagctgaataacagtaatccagctaacatgtcgatagaatgaggcggtaaattcggacacgtgcagctaaaacaagtttatcttttactcttaattgtactttactgttgtagtttctctttcggttcgcgtagcgccatctgtttccgtacaaatgccaatgtgttgtaagtatgacagttatttgtaataaaaatcttctaaaatttaaag

SEQ ID NO: 1616 - DNA, 2262 bp, Aedes aegypti
gcaaactgcatcggagtactgggaaggattaaaagtgattgtgcagcaatttggagtgtctatttgtgataataattagtgttgtaaaaagctaaacccgcccttcgtatgttgcgggtgttgtgcgctactgtatcggtgcgataaagggcaaaaaagtgcgaaatccaatggtgtaaaatcgtagcgggcggaatccatccgatatctgtgttgtgctaaatttctgctcctggtgggttgacttgattgtcgctggctgcgtatttcgacattgttcttcgaccgctggttccttgtcctggcagttcgaccgaagaatagaccaccagcgcgcggggaccgatttagatacgtataaaggcgaaaaaaaaatcaggtgtacaacatgtcggcgggaccgtataactattcctacattttcaaatatatcatcatcggtgatatgggcgtagggaaaagttgccttttgcatcagttcaccgagaagaaatttatggcaagctgtccgcacacaatcggcgttgaatttggtacccgcataattgaagtcgacaagcaaaagattaagctgcagatatgggacacagccggacaggaacgcttccgagcggtcacacgatcatattacaggggagcggctggtgcactgatggtttacgatattaccagacggtctacctacaatcacctgtcgagttggctgaccgacactcgcaacctgactaacccaagtactgtgatatttctgatcggcaacaagtcggacctggagagcacccgcgaggtgacctacgaggaggcgaagaagtttgccgatgagaacgggctcatgtttgccgaggccagtgcaatgaccggccaaaacgtggaagaagcattcctggagacggctcgcaaaatctaccaaagcattcaggacggccgtttggacctgaattcgtccgaatccggcgtacagcataaaccggcccagccgggacgaacctcgctcagtggagatgcgcagaacaataaggacaactgctcgtgttaatcagaatcttgtgcgcaccttttattgtggtccagttttaaggggaatgaaaatctattcgattatctgctagtgcgctgcccggtgcgctctgttgtcgttttgccaaagtgagtccaacggatttgggggaagagtctttatggattttgtgtccgtagtgcggaggtttgtaactcaaccttagaatagatataaccgaaagttctttgatcggaatacaaatccttttagagagtagttcaactggtaaaagttatggagcagttacgaaatgtttatttgttgttgatttagttctgagtttctgaaacaatctttgttatttgcaatacgtcccatagcaaaagaacgattttatgatttcctgtaccaatatttgttagatattttattttaaaccggtagcgcagcaccagtatgcactaccctaacgaagtacgtgtattatacgtgtatgtcaagcatcttaaacaatattaaaccaatgtttactgcataacgaagtaatacaacagacctatgatgtagatgaagtataaacaatttttgtatatatgtaaccgaatttcgcatgagagaaaagtatcaataaatactgtattacccgataagacaattatgatgaacctgtttgaaaattggagattttgactgtgttttcgattgcttttgctagtgctgttacagcgttttctcgaaattttctcatttaatactaataatcgaagcggatattcggaaagtagccacctccaaccatattggaagcgtccatcattttctagtacaaagtatatgtttaacacatccgaatctacaattttacatcaccagaattgaattgcccatgttttaacgtgcaatttctcgcacctctattccattataccttaaaacacgattgcgaactggaaattgctgcaatctgaaaaaagagcctaatccggtcgtaaaattgatataaaaaaataaatagtaaagtttgaagcggtaaaaagtaaaaaatcttgatcttaaaagtaatagaatccatactaaagtattaactgaaagtgaacggaggaaggctagtaaaatgcgcctgtgacgtgatgtagatggtaatcaaccgttattacgaggggaaaaagtgagcatataattttaaaagggaaaagaaaatattaaacgatagtcttgaataaaacatcaaaactgacatttagaatctatcactaggaatt

SEQ ID NO: 1617 - DNA, 4090 bp, Aedes aegypti
aagcaaggaaaaggcaagattaaccactaatccgaccaaaaaagggtcttccgttgtgctcgcggacaaagaaaccatccggacgggaattttccgtcgcgttcaagtcaggtcaagtccccaggaagcaatttcagtgagtggcagaaaaagtgtgagacaagaaaaaaattgcgaaaggattctctcttgtcattgacaaaaggccgtcatttcaggtcggaaacaagactggaaaaaatagtacgcaaaaaacaggatataggggaaagattagtggtgtctagattacgtgtaacatataagtgtacaaaaatcttcagggattcgaccaaaaatccacatcggggataaccagaaccagattccatcactatacaaaaaagcaagtgcggaatctggccttcgcatcagcgagactgtcaacgtagcaggcattgatttctttcctgcgaactccagctaggaaaaaaaaaactagtcgtcacacaagaacacgccacttaacatacctgtaactgccacgtaacgcaactcaaccaacaacgccactactgaaagtaccactgttcaacgactttcactgcaattgcaaccaactgtcctgccaagtgaaactaaagcagcggattacgagtttttctttattttattctttttacctgtatatttcataagagaatttatcagtgcgatcggtatcaggaaatccagtctagttatcgttagttgtgatctacatattactatttaagactctggactcaaactagttgctcttaatcgtcaaatagagactggtgtctagaagcggtagcaatggcggacacagtcgaaccggtagtcgctgacctgcagcatcagcaaccggaagaggacaacaacaatcagatcgacctggctgacacagtagcaaagttaagcatcaacggcacagcaactcacgatcagcaaaacaatagctgcgatgaaaatgaagacaacaacaatctagatactagcactatcaacaacaacgtcgacggtaatcacccatcgatagggaagcgtattcggcgaacttctgaaaagctatcaggcgatgaaccgggagcccgcaagaagtactccttagatcaattattgtcactgaaagacacaacaatcagcagagaaaagcccacaacgataccggatgcatgtaggtctatattgaagtcatcgcacaatccaatgatggcctcaagcagaaacttcggtaatcaggataactcactgctgccaaccttcatgagaggcatggatggcggcggtggaatgatgaacgcccgacctggcccaatgaaacgagcaccatatcagggtcggttatcggccaaggagatgcgatctggaggagatgatgtagacagtggaatcatcaaggtaaatttgaacatctccgaggacgtcaaactacgtgagtgtagcaacgcttggagaccacgatttttacagaaacaggaagaactagacgaagattccaagaaaacacaggaactgttcaagaaattccgtagcgtcctgaacaaactcacgccagacaatttcaatgccttggtcgaacaggtcaaacagtacgaaatcgacacagaagaacggttggatggatgtatcaaaattttattcgaaaaggccatcatggaacccaatttcaccgacacatacgcccagatgtgtaaggaactaggcacaattatcaagatcgaaaccagcgataacaagcaaccgaacttcaagcgtaagctgatcactcagtgccagaaggaattcgagaagcatcacactgataaggaagagaatgctagcgaattggaggaatcgaaaaagaaagccgccgaaggtgaggaaaaaacagaggaactcaacgaactgcaatacgaactggaagagaaggatgccaagatcagacgtcgagccatgggcactatccggtttattggagaactgttcaaacaagagcaactgacttgtaaaattatgtacacttgcatcaatattttgttgagcgaggagatgttggatgaagaagcactagagtgcctttgcaagctcttgaccacgataggtggtcgaatggagaaggactccggccaagactcgcaaagcttgcagtactatttcgatcgtctgcaggagatcgccgacagaaagagcacaatccaagtgagcaaccgaatccgcttcatgattctggacctaatggatttgcggaagaataactggcaaccacgcagggcacaagccgcgccgaagacaatggatgaaattcagaaagaggtcgaaaccgaagagaacaaaaaccgtattctgaactttgtgctgtcgggcagtggtggccgcggcggcggtggtcgtcaggatggcgaccggcatcatcgctacgacggaggcagtgcttccaagaacaaacagcgcttcgtcgacgacgatggtttcgtacagccggtgtcgaagaatacgtctcgccaacagttgccgatgttcgacccgaagaagctcaacttgacgcaaaaatctccggaggtaacccgtctcggttcggcatcgatgttccagggttggggcaagaacaatgcctttgcttcgttgaccgatgaccaacaacagcagcagcagcagagttcagctggcccacccagtttcttcggctcgggaggattcggcggaagtagcggcggtcattcgtccggaggaggcggcggtggcggcagtaaaggcggcggcggctacggaggagggaacaaaaaatccggcggcggcggtggaggcggtggaagtggcaagaagcccatgtacaatggcagaaacagcagtcgcttctgatgataggcccagggtgtgaatgatgataggaatttcctgatttagccgtttattttccaatttttgcgtcttattttgctgttagatccagaaaattgaaatagggtaattattaaactttatacacatgttccctgaagaaaattctagcaatcgatcttccaaatgttagggcagattgagggccaaacgcctttttgcagtaggacagggtgggattcagttgagctgatcgacaattgctatagtgtaggttgcagcaacacttttttttacatagaatgcgattatatttttgttaacaggttctgcttttgttttcaagattatagcttttagagggatatttcataataatcaaaacaaaaccgtagttttttctgtacattcaatccgagttatccaactctgcactcagttattgaaaacgagtttaactatattctagccggtttaacactgtgttcatcagaactcaaagtgatgtaatagtagtgcttcactaacgacgcgtaaaaacagccaatattactaactaaagttccttttgcaatatttagttcacggcgcaagggtactgaaacttcactatacatattccgagagtggtaccatagtagaagtgcgccagcaaagcaagtaatgaccctagcacagagatacagctatggaaaaagaaaggtggaaacggaactggacgtgaaaagagattaaaggaaaacgcatcgttacaaccattgcaacacgagaaacactacaacataatagtcaagctataacgctaatatatcgtcaaaatgaaatttatcaccacatgatgtatagattaagctacaaatgcctttaaaacttccaactgattagatatcttagtagatcaagatgcagagcagtcatcatccaaccaacggttgctcttcctgacgataaccatcgaggttatcatcagacccacgcaaggaagtaactccaaatcatgatgacgattgattttgaaaacattgtcggtaagtttgcgggaaaacggaactctaagcatagggacagcgatattatgtttaagtcatacaaggcgttaatgctcaaaacatatgcagcaaccgtatataaataaaatgatgaaataggcgacacatggtcgattatggaatgatcgattcttaggaaaataattaattgcataataatattaataaagtggataaaactaattttaaacttattacgatgtaaaagtccagaggag

SEQ ID NO: 1618 - DNA, 432 bp, Aedes aegypti
ctagtaggagtattttggttttggattccacaggtgtcagccgagtgccaaacccgatcgatctattgttacgagtgcgacagctggacggacgcccgctgcaaggatcccttcaattacacagcgcttccccgcgatcagccgcccctgatggcgtgcaacgggtgttgcgtaaagatggtgcgacactcacggacgccttatgaagttgtaagacgaatgtgcacatcacaattacagataaatctctttatggtagatcacgtgtgtatgatggaaagttcaggcaatggtcatatgtgtttttgtgaggaagatatgtgtaactcgagccccagcttatttatcactaatcatctcaatgtgaagatgtgcgtcagtagcgtaatagccgtttttctactaaatgccgtgcagagagtgttgcggtaa

SEQ ID NO: 1619 - DNA, 2296 bp, Aedes aegypti
  misc_feature (1)..(589): n is a, c, g, or t
nnnnnnnnnnnnnnnnnnnnnnnnnnnnnnnnnnnnnnnnnnnnnnnnnnnnnnnnnnnnnnnnnnnnnnnnnnnnnnnnnnnnnnnnnnnnnnnnnnnnnnnnnnnnnnnnnnnnnnnnnnnnnnnnnnnnnnnnnnnnnnnnnnnnnnnnnnnnnnnnnnnnnnnnnnnnnnnnnnnnnnnnnnnnnnnnnnnnnnnnnnnnnnnnnnnnnnnnnnnnnnnnnnnnnnnnnnnnnnnnnnnnnnnnnnnnnnnnnnnnnnnnnnnnnnnnnnnnnnnnnnnnnnnnnnnnnnnnnnnnnnnnnnnnnnnnnnnnnnnnnnnnnnnnnnnnnnnnnnnnnnnnnnnnnnnnnnnnnnnnnnnnnnnnnnnnnnnnnnnnnnnnnnnnnnnnnnnnnnnnnnnnnnnnnnnnnnnnnnnnnnnnnnnnnnnnnnnnnnnnnnnnnnnnnnnnnnnnnnnnnnnnnnnnnnnnnnnnnnnnnnnnnnnnnnnnnnnnnnnnnnnnnnnnnnnnnnnnnnnnnnnnnnnnnnnnnnnnnnnnnnnnnnnnnnnnnnnnnnnnnnnnnnnnnnnnnnnnnnnnnnnnnnnnnaatgacgtcgcttcagtgcagtgcatgagcgaagcaagcctgctactgctgtcgagagcgaaatgatcggaacagcagcagcagcgctccatgtggcgcccgaacgaactaacaacacttcgggtgaaacccgaacgaacacggcaccgactgctacgatgagtgtggatgagaacgattcggctagtgggaatttcgcggcttcttccactgccggaatcgatgatgggttggcggcaatgtcccccggcagtggcagaggtggcggcaggaggacgacaatcacggaacaaggtagcgatggaagcgacaaaaacaacagcaaacgcaaaacccgccgtggcaagaccaagcgtggtaaacggtcatctagtgcgcgaccttattccaaatcccaatggaagtaccatgtaccgatgctccggtcgacggcggccaataaacgtcgcgttaaggtatccttggggggactgaccactagaagtgctggtatcatcactacgaaggatccgttcatcttgtccgatcaaccaccgctagtgccatacaacaccaatcgcttcctgatggaagaccacatgccccacgtcctaactccctcagaggacgaagaggaattcctgaccaaggagttctccagcgtgtacgaagacgcgcgctcggaacggctggaagggctcagcaagagccagctgatacaggagtacttgcagctggaggccaactatgagcaagtcatgcggcgctacaacgccgtcaaatcgctctcaatcagggaggaaaacgaaagtgctgtgaataatgcaacgatgacgaccaaagatgcaatcgagggaggcgtggcgttagcggcggcggcagcggcgcccgttgctgcagcgaccgatcgaagaaggctggaggataggattcgggagctaaccgcagagaacctcgaactccgccgccagttggagcacgcatcgcgcctcggcatggtcctgtcggccaaatcatcgccacgaagctacggcggtgcatccgggccccaaatggtcgaacggatggacagttcctcgtgccatggcacgagcagcgaggacagcgaatcggacagttcctcctcgaccagttccagcagtagtgacaacgatgacgacgatggcagttccagcagcatgagcgacgatgacaatgacgaccgcgatcgggaaccactggtggttgccatggaaggatcggacgaagcggttgttccgatggaatcgaacggttgccaccagaacggagatctgttggccgatgacgaggaagaactgagcgacgaggaccacaatggaccgctttctccgctgagcggacagagcatcaattcccctcctccaccgcccctggtgatgaactgaactgctcaatctccccgatggggagggaggtttgttacggattgaacgaggatcttctatttttcgcttctagttagattggaacgaccacaatgatagtcatttttttgtaggtaagcttaagtgtaatttctcaatatttgagaaccagttttttttcctactttcatcagttgcttgattttaaatgattctcagaagaaatagttttatgctttaatatatacattttgcgtcaatgatacaatattaaaccgaacttgaacaatgaaaaaaatacaataaaaatcgtaaaagttttctacaaaaaagttaaccccat

SEQ ID NO: 1620 - DNA, 982 bp, Aedes aegypti
ttttgttggattgaactgcatattatcatgtttgacagtttgatagcgatcaatcaatactgaacttgtgaaaggcggcgtggcggtctgatcaaaaagatggatacctttgctgattatgtatctcaacatacaacaagaagcgtaggatcagaaaatgggaacacgacacgaggatcgccgaatcaaacgtccttatttgaaagtgatcaagaccatgtcaaatgttcgtttaaaccatgggtgatgatcacccttttgagcttgcactggatcgcgtcctgggcgattaccataacggggatcgtcttgatattcaaacctttcgacgatcttgtcccttgccatctgttctacctgattgtgtatctcagagtaggttactggttcggagcgtacaaactgaatgaggcaatcaaagattcttgccgcaagttggttcacgagaactatgaactgtacgaaagccttaccatataccgtaaagctccgctgcagatcgtctctttctggaacacggcgctttttgccgtccttggatatgcgaaaagcttattcgtgcaaaatgggacagcaacgttgaaaggtccctgtcagcatcctttcgataacgatcttctggatgcgctgcgatctccacaaatggttattgtaatcttctgtgccatagaaagccttgttctcagctgtttctatatgatagcttttactcgtttgatgaaagcttcctggccgtccaccgatcaatacaccaaacttcacgagcatttgaatgctgaacagacattgagacgacaggcagaaaagatcaaaattttggagataaaacgcgcccagctgaagaattgtgcggcagcaataggattattggactgcaactagagcttttcactattacattccaattcgttcagtttgtgcatgcgtacggatacgttgttagagttaataaatgttcgtttggttgaatctattcacagaa

SEQ ID NO: 1621 - DNA, 5242 bp, Aedes aegypti
gtgcacttccgtgagtgctgcgtcgagcactcgcctctcgtcactcaccgccaactattgtcaaagttttgacagctcgaaaggaaaattttcagaattggacacaaattttgcaaaatattgcgtacaaaagtgccccaaaatggagtgaattttcgtggaaagtgtgcagcagcagcccgtgcaacgatagacattggatttcggtcgatccgtggccgcgccagttcacccggacggattccagtttttgcccttctccatctagaggcatatcaatttttgttcacaagcagcgaagagcgaaagagtcgtcattgggtttggaaggtggaagagaagaaaaaacgcaagaggcaagaggcagcaccaacaaaaacaacaaacgaaacacaaactgcacagctccactttactccgctgttgacctctccagggcggttgtgtgggacttctggaagtgaaggaggtgccgtctactgaaagtgaagggattctccagggaaatcgtaagccaccaaaaaatcatccgcccctcatcgatcggcggagattctctctccgacaccgccccttgtataggtcatgtcatgtcaacaggcgtcccgagtccaggaagatccgtatgccttcacggagccggcaccacttccggcgaacacatccctctacaagcactcacatgcggtcagtagtggcccgcagtccactgttaacatccctgccacaagttcagcaacgccggtcatacaggcgggaaccagtttgctcaccagcagtggcgcccacaatgccatacagcatcgcacctcggggacaaatcccaaggtgacacccatcaaagtgacgctcgtacagccttcggcagcgtcggcagctctcagcaagtcgaggctgaatggtagcaccgctgcggcaatcaccacaaccagcaccagcgccggtgggaccgtctttcgaactgtgtctgtgccgcaagcgactacgatcgtgcagcgagctgctcaagcgaccgtcagtccgtcgacccagcaagtgatggctaccatggctggaaccagtagcaacaactttaacgcttcgtcatccccatcagtattcaccaaacccttacaggttcaaatatctccccaacaggcgggaaagttctcccgacgagtacttgccagcaaatctccgaatgtgtcgccggcagcaatccagaccgtgcgaatagtcaaaagtccaagtccccaacagccgatcggaggaaggcccagcataacgcctgatgctcgaagatatctcaatcattccagcaacagtctgctgggaactcctccacccacgaccacagttgccccatcgcctccaatccaatcggtatcccccacaaagatccgtttgatccaaccgcaaccacagggaaagatcttcctccacaccccgaacagtagcaacagtttagctgcggccactcacatttccaatcctgctagcatagcggcccttcgcaacactttagcccgccagaatccctcgctattgaataagatcccaaacgtaccgaattcaccccaacaaccaatcctcaacgcaaacagtacagtgcttccaacggttcgacagaccccggcgactacaatcccaacgtcgatcaacatccgacgatcgtcaccaccgacaagccattcaagtcttgaaaccgcaaccacgacagttcccccgccacctgcttctccttcaccggtaccaaccgtaccaaccaccgttgcaacattagcttctcccgcaaaccttcttgctgcctccaaatccgttccccagaacccccagttgataccaactcaacggtctcgaactcccacgtcaattctgaaacctccccagccgcctcctccaactccacctcaggacgacttcacgatcccctccttcatcatcccgaagaatgaaatcaaagccgaaccgcaaccccctactcctccgcctcctgctccttctgctcccccattagccccacctccacccatcgctccaacaacccctaaaacccctcaggaaaaaccagccccgcctctcagcaccaccaccccatccacgccgaaaacgcagggaagaggtcgcccctcgcaggcggatcgtgccacttcggccaaatcctcccagcaaggccccaccggaaagcgaatgaagcgatcgtacagtcgatcttcgcaccacgaaaccctcgaaaggatactgccccagtctcaaatcaaggaagaggtggacgactcaagtgaaaccaaatctcaacccgccacggttcgtatgtccaagtggaagcccccgggtgccatagccatcccgatgaaccgcgaatggcacgctccggactcgtacgtgttcgatatctgcagccccggatcggtgaactacagggcgctctccacggcaccttgcgttcaggacgtctggttcaacgaagtctacgccagttcggagatggacaccgatgcggccgtcttcgggggaatccgggccaagaaacccagcgccaaaaagggcgaggaacagagcggtggaaaatttccgcagttgaatctcgacgttgggcagggtggagccttcgagctcaagaaactgagccgagacgaaaggctggagctgaagcgggcgcaactccggcgccaaacggtgcaatactggaacgggcagaagctgcgatgcaatctgacggccaagcgacggttcaaggatacggccaagatgttgggcaagctggatcatcagcggcagctgacgttggcgaggaatggtggtgaagcacagccaaagtgccagcgacagggatgtaatcaggtggctctcctggcaacgacccactgctatcagcacataacggacaacaccgagcagcgattgttccaacagtgtacggccaagttctccgacaacagccagtgccgggtgccggtgtttgacatcagccacgagctgatcctctgtcgggagcacgcctggaagcacgataatcatgacaaaatgtccgccgaggtcaaactgctgaagaaaccgggagccggagtcaacgctgttgctaagaagaaaccaccggtggtcaagcagcaacccctggccacatccgctcgaacagctggttcagttccgacggcggataagaccaagaagaagagcaaaaagaagaagctgacaccgctccagcagcaggtggcacttcaccagcaacaatacaaacaacagtattcgaaaccgacattacctccaccagcgtacgggaccgtatctggagcttccggaaccgtgcagatcgttccaaagtccaacgctatccggcaaacagcgggaagcaatcttctacagcatcaccagcagcagcagaggcacctgcaacaacagcctcccatagcacccggaggagtagtacaaatcgtcccaccgcaatccacaatcagccgaaacgtccacattccgttgagccagcacctccgacaggcccagcagcttcagcatcaatccctcgggggtgctcctccgactgtgtatccgcaactgtcctcgcagtcgatcctccaacagcagcagcaacaacaacaacagcagcagcagcacatcataggacggaaccatgacctgatgctgaacaactttggcgcccaccaacagcagcagcagcagcaatctgtcggtttcgaccagcagcacgtgcagcaaatgttgagcggagccaccacccaggatctgctgaacatctgcgagaacagttcggcttacgccagctccgaggataccggcgtcggagggttgtccgagtcggaactgatggctgcccaggatgtgatagaggaaataccgttcgagattgggaatctgaacaacgtcctgagtcagctgccagccgatgcatttaacgagttgctgtttagtgagcaagagcagaacgggcccacgttcgagtccacccaggaggaggaccaggacctggagcgagcgctggaagtggtcggcgagcacgtcaaatcgctggaggacatgacggtggagtcggccaactttctgggcgacttcctggacaacgtggacgacgagatgctggacgggtcggacatttgctcggaccagatgctccagtcgcccaacacgaacgacatccgcgggctggtgcacacgtgaggaaatccagcgcaggcggtcgatgggtaagcgcgacgataccgttaagcgtgtgtttgaggatctgaatgtgttgacagttggggatttatttgcttgcgttcgaaggggaggaacaccctcaattatgtaactattcatgtgtttatgtaaggaaacttttgaaagtgatattttcggttgagcgaaattaattttaagggtataaactattttctcaaatcctaagagaagtgtgacatagacaagtacggggtggaaaaaaggagtcatgaatggaacttgtgtattcctactaatgctaacagagagtcgaatttgttctgcttcatttcatgtgtacgattctgagcgaaaccgattaggatagaatgtggtgtacatgtagaaacacaagagtaacaaatggaaacaataatccttatttattcacaaccgctattctaggtgaaagaatgggcttttttctcatacaaaaagctccaaaaaaataacacatttaatcgaggagaactgaatgtttcagttcaccgcggatgtaacgctttaggctttaatacttttatgttgaggtccccgccgaagcggagccttcggatatccggggttaggtgatgtagtgaaaacggacttttatttgacactaaatacgcttctttacatacaaaacaaacaaaatcccgttcaatgaattctgtgaatttgtttatcgctattttactgataatacttgataataacaacaactaaatccgttgattcgcgctattattttctgattagatcctaagttgtactcacatacatccatttatcattttttttttataattaggatacaggaatactaggttcgttttaagttgtatacaactaaaagcaaagcaacaacaataaactcgcccattcgtttacaggctaactgaatagggaagtcgattttgtttcgtttttgttgttccatccgaaatcattttctattgtttctttagattattacactgttttgtttttgtcattagttctttggattaagattgtcagttaactttcttttcaactatttcaaaaatggtggcagctattg

SEQ ID NO: 1622 - DNA, 1210 bp, Aedes aegypti
ggacgtaaaacgtgacattcgggcggcaaacaagcgttttagattctcagtagagctcatttgttcacctgtggcgcagtgttatcgggcggtggatgttgttatattcacttgtttttatcggaaaaagtgctactttgcaacgcaactcaaacatagttcaaggtcgtttgggatattggatcaatcatctgcgttgtgctcggtgcaagtaaagagagcataaagtagcagtcaacgcatggttataaccatcgaccaatctgaactggattcaacctacaaaacgtgaaccggaaccatcgcaaccgacaagatgtcgctcagtaccagcgcaaacctggtgaaatatctcctatttctatttaactttctttttgtgataacgggtatcacaattatggccattggcctcaccgtgcaaggtgcatatcacaacttcagggagattttggatccacagttcttcagcgtgccaaccttcctggtcgtaattggcagtttcatcttcatcattgcattcttcggatgctgcggggcctacaaagagaactactgcatgacgttgacgtttcgatcctgttggtgttcatctttatcttggaactggcggccggcatcagtggctacgtgttaagaaatgacacctacaatttggtttccaacaccttgcaaagctccatgggcaagtacggtggcaacacgagcaatgagatcacctacatttgggacgagatccaagttgatttcgactgctgtggagtcaataatgcttccgactggggtaaaactaacgacaagctgttcaatgacacatttttgccaatgagttgctgtcgaaccaccacgggtgccatcggaacggttcgttgcatggaccccgaccacaaggaaacactacgcacgacaggctgccttaactcgtttggaagctttatcaaggcgcacgcggtaagcttgggagcggccggaattgctattgcggttatacagttcttcggagtgctttttgcatgctatctatcgaagcaaatcaaactgcagcaaggccatactggattctagtgcaatattagaggaaagactgtgcaattgagcgtgactggcaatcgcgcatgttactgatggtgtgaatgaaatcattatccaatgtgatcttaccgcaaccgaatataatatatgtataaatacagttaacatcatatcaggc

SEQ ID NO: 1623 - DNA, 1500 bp, Aedes aegypti
atgggctccctggtaccgtttctgttgctgtttcccttggtagggtgtatttcaattgattatctcacgaaacggaataccatcctagcagcggagaaacaattgtcaaccgggggtcatgccttcctcacagccaaggaaatcaaagccgacgaagttctcatgaacctcaagaacaaaaccatagtcgaaggagttaccagtcccagatcttacgccccagcgatgcacttcttccaggccaagcccataattgacaacagcagcattttcaaaattgtacgatctatgcccaaaggatcggttctgcaccttcacaatacggcagcggtaagctccgagtggatcatcaaaaatttaacctacagaccggaggcaaagctgtgcgagtccgaaggcaacgtctacttcaccactcggaagagcccgatatgcccggaggaatcgctcaagtccattcagtcgcttcgtgcgaaaaacggctcgattgaagcgttcgacgcttggttggagtctcacgtcaatctcaagaagagcgaccccgaattgatgcacgcggacatcaacaccatctgggtggagttcgagaagatgttttccgtcatacgggacttcgtcaactacagaccgttcttcgaggccttccacacgcagctgttgaaggaattctacgaagacaacgtccagtacatagaactgcggatgcctctgtcgaagttgtacgatgcggatgggaaagtgtacgacgaagctcaggtggctaccatcgtggtgaacttgatcgatagctttaaagcgacccatccagggtttgttggggctaaggtcatattctccaagcatcgaggcgtcgatagcggaacggcgcaggatctgctgaagtcttacgtgaaactgaacaaggagttccctaagttggtggtcggtttcgacctggtcggccaggaggacattaaccaaccgttaaccagcttcctggaagaactgcaggagttcagaaagactaccccatactttttccacgctggagagacaaatggttacggcagcaagtcggatctcaatctgattgacgccattctgctcgacagtcgacgcatcgggcatggattctcgctgtacaaacatccggtccttcggaagatggtcaaatcggaagggattgctttggaggtgtgccctctgtccaaccaggtgcttcgcttggtgaacgatctgcggaaccatccggctgtgtattacgtctccgagagcataccgattgtgatatcagcggacgatccaggcttttgggacagcaaaggcgtcagctatgatttctactacgcattgatggctattgcacccagttcgatcgggattggattcctaaagcaaatcgtttgggattcagtgagatatagctcattgacaccggaggaacgcacggaatactcggaagttctccagccaaagtgggaccaattcttggacgatctaatcgctggaaaattattctaa

SEQ ID NO: 1624 - DNA, 3685 bp, Aedes aegypti
ttacagagcggcacggggtgcacttttccaaaacgatgggagggacgatggtttcaatctggggtacaacaggaaattactatagaaggatcaactttaagtactagaggaagatgtatcgctagtgatggagataaatttttattagtgaacgaaaagggatgtcatcgatgcgttgtaatataccagaagcatttaaacacacttcagtataaagaaagtgagtgtgaagatatgtatataggccagttgaatccagcgccaatgcctattcatagcgttttaaaaagtgatcatagtcggggggctcatcccaacatgaacgggcattcacgattatcgtcatcggatcagtatgcacgatccaatgaagatagcgacaattgtatgggatgcaagggacgcgaaacgttgcactacctttgcgaacagatccctggcgatgcactactctacagtatgttcaagatcaaccccgagcccatcaagtgtccactggcgggatccttcaccttcacctacaaccgaggtcatggggagtgccggagcccgatatcgaagatggacatgtgcacggaagacagcaggctactgttgaacttccaggcgtgtcctgacgtatcgggtacggagagcacagtggaagaactgacctgcctggcgggatggaaggacggtaattcccgatatctcgtcggactggtgtctcaccaccatgccatctcgaatgaggatcgctatcggtgcttcgtgtacgcgaagatcagtggatcaggtgcaccgaatgccgatgccgagtacaagttggcccagtccggagacgccacctgcaacgggttggacagcgccgaagtcggatcgcgtatcatgagcctgaagcgggccccgatgaccgagcggtgcgatttcccggcgtggttcaaaggcccccgccattggcatgctctgatgggaagtgctaactttatcttccatccgagcgatggatcgctgcacattgtaaagccaagcggctacatggaggcgagggcactttgcgagcagatcaacaaacagacggccaccgagatgatggccgtcgttcatcacacaactggatgtacttctgggtacatgtgtgtaatgttctatcgacgagatactcacgtagctgagctacagatgggaacacccgcagctaggttagaagatgcgtgtactaccgagaatttcgacgttcatcggacgccgtttgttactttattagctaataaccccgagacacagatctgtccaatggaaggatactactcaattaaaggtttcctcattccttcgtcgacgatttcgaggcacaagcgaaatcacaacaacaagagccggatgcaccggcaccgggaggtggtcagcttccgcaaccaggaaagtgcggacggctactacagcaacctggagaagcggaaagctttctcgcgtatgaggcggacagctgcggcgcagcctagtgataatgtcacacaagacttttacagtttagaatctacccgggctcgtagagaaacgatgggatgtaatattaatcacaataccaacagacgtttattcataggatgtaacgagaatactgtaatagaagttaagccaaaatgtaaaaacgacgaagaggaaacgtacacctgtcatggccactggcaggagaaccagacgacgttcatcatcgcgaagcacctgagctcgcagcatggcgtctgcatcagctatgtgccaatcgagggaaaccaggtgcaggtgtacgtgggcgatacgtgtcaccggcccgggatgcagcagcaacatgcccagactggccagtggggtagtaatggggggtacggtgcggctgccgggtcggttccgatgggcggcggtgttggaagcggtggtggaggtggaagtggttacggaggaggtggcaccaccaccattcataagactatggcaaacgttaccgtgctaggcaaatgcggcgacacaagcacatcgatcacgcttcactaccattacggcaaaggctggatgattctcggtgtattatcgatactgctgtttaactttactctaagatgatcacattgtaaatcgcaatgaatcggcatttggcgtcaagcgctctgttcgcaaaaactaagttggacagagacagtagctgcatcagaggcatactgaatctagaacaaacaagctggatttaactggacagaactcacttacattcatacaacacaacccaactgtcaaactggtgaaaacaacagaatgaaaacctatcagaaatatgatgtacatccccacactgtacaaagtgatttagtaagagacaagtaaagacaaacgtagaaacccaaataaacttatgattttttattgtttttatctctttggttttatttattatatctacaaaaactccctgcgattgaatacagaaaaagcgaacaaatcttcctttctcgaatcggtttcacttaagtgatgatttagcgtaagtaagcatattatgtatacagagaaagccggatgagatagagcagaatgagaattgagtaaagaaacctgtataaattgtatcggcgccacgagtatcgtcagtgcaggcgcaaaaaatacacacttgtaaggaaaaaaagccctatagtcaatatattctcctcttgtaacgaaataatcgagataaacgcagaagtataacctctattgaatgtgatcgttgtgattgagaaccctcttgatacctgtgcttttgttggaaatatctcccttattcctgaataggacttaacaaaaaaatgttgaaaatgcaaacgtcttgcagtgttgtacattttttttttcattcggtttcgtttccgactcgataatcgaagtcttatgccatttttcgtaatcttggaacccactagaacacagtcacacccacactcactgccagcaccctcttgtgtattttatattaaaatcacacaattactcacacacacactgaacacgcccacaaacacacttccttattctagttcgaatgcaaaaaaaaaagaaacacacaaagtataagtaactttaaatacaactgcggataaatgaagtcaacgaatcacattgcgcttacggtactccgacgtgaggatgaagaagaagaaaaaacagtcaagagaggtggaaaagaaaaaagtctgatccgaacgaggaacaagacgaagtataggctagagctgagaaaatgtataaagcaaattattaaactattcattttttccttaaattatgtatccaaggtttcctaaagaagaagaaagagagaaagagagaacaaactaaacacaagtgatgcggtatatactgtgcatgtgcatgcgaactaaacaaaaaaaaaagctaccagcgggaaagggggacaatagggagactaacgagaaggggaaccggaagagtgggacagtgcgtgagggcaggggagggacggtgcgagcgaattgaatgaatttttggcggatgtcgaatggtcgaaatggtatgaaaaactgaagtttttaagaagacgaaaacagaactacaaccaagtactctaggctttttaaattaaattaaattatcaacagtataacagatttgatattttttgtgtaagtacttaaaaccaaaaataaaacgcattatgttttttatttcg

SEQ ID NO: 1625 - DNA, 291 bp, Aedes aegypti
cgtcgccagaagaaaaactacaaaagtttcgcaatattaacaagccagctgctgcattcggcaactcatattcgaaggaaaactctcgcgtcatttagggtggcgggagttgaaaagcggctcgcaacaaaaggcttcaaaataggtcagcttaacagcattcgcttcaacgaagacggaacggccaggatgcacgagggcgaaatagtgataaagaaggtacaggggcacgtcccgaagtcgggtgccccgagagaaaagccggcaaaagatgcaacaatcacgtatcgg

SEQ ID NO: 1626 - DNA, 1086 bp, Aedes aegypti
ttgacgcgggatgatatctctggtgggccggtcaatctggacgaaatcgagccgggcctgtggttggggaacgtgacggcggctgcggatttgcccacgctggagaagctggccattcggaccgtgctgacgatcgattcgtgtccactgccggcccatgtgaccgagaatccgagcctgcgggtgaagtacattcaagcttctgatgtgccaagggaagacctaataaagcattttgaagacacgaacaacttcatccgagaaagcttagaagaagagcgaaacgtactggtgcattgctacttcggcgttagtcgcagtgccacaatcgtgattgcatacatcatgaacaagtacaagcttagctacgacgcggccctccagcgggtcaagtccaagcgtcggttcgtgatgcccaaccctggcttcatcaatcagctgaaactgttcagcatcatgaactaccggatcgatccgcagaacgagaaatacaagctattccggctcaaactggcggcggacaacgtaagaaaagccaaacgtctcccggtgaactgcatggacgtagtgaaaccggatcctgccgtcacacaggaaacgcctgagccgatagtctatcggtgccgtaaatgccgccgcgtgatcgccaccaagagcaatctcctaacgcacaaacagaaacctccggatggaagtgcccctaccgggtcagaagacgcaacagcggtgcctgcggccgatactacggaagcaaaaatctccagcaaagagggtccatcgatgtgctacgtaacggagcagatgcgacgcagctcgatcaccagcgacctcagccagcgatcgtcggagaaggatggtgtttgcagcaagatctacttcactgaaccgctcgcctggatgaccgacatcttccacaatactcagggccggctgtactgccccaagtgcacggtaaagctgggcagcttcaactgggtgatggcaaccaagtgtccctgcggggcggagatctatccggcgttctacctggtgccatccaagacggaatactctaccgtggtccagaacgtgcaggtgacagtgtaa

SEQ ID NO: 1627 - DNA, 919 bp, Aedes aegypti
ggatccttcgaaacttgttgtcagttctctgcgtgatcttcacggtgctatttatagagaggtgttcttcggttcaaaagtgcaccaaggacatcactttccacaaggacgcatcttgggggatccagtgttgctgctatttaaaactctgtaatttgtcaacccaaaataaaccatgaggcactcaatattcagcatagtactaggtgtgataacgctgtcgaccaccccagcttcttcccagcgagatgtgctccgattgttcgaaaactgtcggtggggaaagcccaatttcgatccctgcatcaaaaaggccttcaacgccctcaggccttggttcaaaactggtctcccggagtacaacgtcgctccattcgacccgcacaaggcatctgtagtggaacagtaccgaggggatcgagatggactggccggctatcatcttcagcttttgaacgtgtccgaatatgggtggaccgaatcggaggtcaccaagtataagacggactacaaaaacaatcgcatcatctactcgcagtacttcccggaaaagtccttggatggccactacagcttccagtcgaaaatgctcggccagtctagactgacgaaaggcagctggaacctgacgctgtacgattacagtcaaacgacgaccgtgacgaggctgggcgaacagggtggactgctcaaagtgcgcgttgagatcgaccggatcggcgatatgaagctgcacatctccgatcttttccatggggcgaaatttgttgaatccatcgccgactttgtcatcaacgccatgtggcagccaagtttccccttcgtcaagccgctgatcaacgatctcgtcagcatagcatttacggacatcttcaacgaatccttccgatatttcccattggacaaggtgatacaatag

SEQ ID NO: 1628 - DNA, 962 bp, Aedes aegypti
tgtgaggtgagcgaacatataaaaggcggcagaggttcatgctcggtatcagttagtacagaaacacgcattcgataaagtgatttcactaatcagtgcaaaaacacattcagagaaaaagtgttatcagaagaagaaaatgtcgctcattccgatcgtgttccgtgactggtgggatgactgctgggatactcctctgcgtacatcccaactcttggaccagcacttcggcagtggaatcagcggagatgatttgctaacggcactcaccacggcagctgctgctcagtctgcgttacagaatcagagacgctcccgctataacagaccgtggcgcaattcaagccttgccgctcgtcaggattccggatcaacggtcaatgtttcggacgacaagttccaaatcaacctggacgttcagcagttcgcacccgaagaaatctctgtcaaggctacagacaacagcattatcgtcgaaggcaagcacgaggagaaacaagatgaacacggattcgtttcgagacaattcgttcgtcggtacgtacttccggctggacatgattgcaaccaaattgtctcgtcgctctcatcggatggcattttgacggttactgctccaaagaaggccttgccagaagcagaaggacccaaagcgattccgatcattcagaccggccagccagcgaaacaactgcaggattctgaaaagaaagcagtcgaacagcgcaaataagcatttctgagtgctgctacttgacaacgctacctcaatttgatgtctttacttgtcttaatcataatgattaactataagattcatatgtaattcgttcctgaactgaatttcttgaatattgtaacgttctaagttataatgttatgaggtataactatgtgcttttttgttttatttgataaagtaattaaataaagcgttgattctgctgttgtattaataaaaa

SEQ ID NO: 1629 - DNA, 830 bp, Aedes aegypti
cagttgatatcaaaccctcgtagccagtgttcagtgttaacgcataccgtctatcgaaaaccccgtataaagtttctttgttcgtgtgttcagaaccaagtccgatcaagtcacgatgtcgatcgttccgattatgttccgtgactggtgggatgaccactgggataccccgctgcgtcaatcgcggattctggaccaacacttcggaagtggcatcagctctgatgatctgctaacggccattacgtcggcggctgctgcacaatccgctgtgcacaatcaattgaggcgtccgatctacaatcgtccatggcgccattctagccttgctccccgtcaagacatcggatcgacaattcacgccgacaaggacaaatttcagatcaacctggatgtgcaacagttcagcccaaccgaaatttcggtgaaggcctctgacaacagcatcatcatcgaagggaagcacgacgaaaagcaagacgaccatggcttcatctcgaggcactttgtccggcgctacatgcttccgccgggtcacgactccaatcagatcaagtctacgatttcgtcggatggaatcctaacgatttcggctccgaagaaggcgatcatggattcggccggacagaagacgattccaatcgtccagaccggtcaaccactgaagaagatcgctgccgagccagagaagaaggcatagtgacaagggtttcgaggttttactgttttatcaccttacatggttgggatttttgttcgtatagtacttgttaacgttttgctggaataaatggtatttgtttgtaattgagaatgtatgtggaaaagac

SEQ ID NO: 1630 - DNA, 579 bp, Aedes aegypti
atgaggctaaatgctcttttagaagacgtttttcagctccacgtcgaagaccagagtgctgttcggggggatcaccggggggcttcctcgggttccgtaggccaactggtggggcacggtcaatcgtcgcttgcctccgaccttcattccggacactcccaaatcccatcccttgatgacttctccgcggcccagggcgaacttgaagccgggtcccttgttggtcgaatcgaacaccttgttgttcttcttcaggcgaccttcgtagtagacggcaatcttcttgcctggcttggcttctgcgccaccgccgactttgaggtcttccacgaccagtccaccctggagggtgcgtgtcttagcttcctgctgctgttggccatccttcttcagttccttgggagaagctttgccattttcgacgccgttctgcttggagcccttcttttccactttggcaaccttggctttcggttgttcgtcttcggattcgtcctcctcgtcatcatcatcatcctcatcctcgtcttcatcatcgtcatcttcatcgtcgtcgtcactgtccgcttctccgtctaa

SEQ ID NO: 1631 - DNA, 1557 bp, Aedes aegypti
atgacaccagaagactatatcaacaaactgccaacggaacttttgtacaaagtgttcgactacctgaacttcgagcaacaaatggtggcaatggcagtttgtcatcgatggaacaaaatactatcgaacgagtattacattgctcgccgccggttttgtttggacacgtgcaacctgaatggagacagttcgctgctgcagaagatgaaacagtaccgagcgttcacgatcaaggattccaacagagatagacgcgagtttttggagccgttgaggaagtttcttttctgtcatgaagtggccgaaaaagtggaggaactccggttggagctattctggtattctctgtcggatctactgggagacaataatgtattgtacttgccgaagcttgagaagatcagctacttgtcgtcgatttgggttgaagaacaggatctgctacagtgtaaagtggttgccccaaatttaaaaacagtgatcctggaagactcaaaaaaatccggcaaccctttgatacagatactgaataatcagatcgagaccttgagtgtccggttcatcaacaagatgctgttgtttgcaacaatcggaaatcttcctttcacaagcctcacaagtttgactttgatggcccagcaagggagcctcctttttcgggaagcagacttccatgcgtcccacttgcagatcttcgggcgcttaacctatctgagaatcagtgacgagaaaaacgtattctatttgatctacagactgatactccgcgaagcgaagaatctggaaacgcttatcatcaatggacgtaaaatgagcgaagaggcattcaatcagattgatcggctgaagaaactgcaagagttatgtctaatggtagaccttcagaaatcacaatctctggcgagactttcgttgccaatgttgaaagtagttacgacatacgctggttcaatcatcccattgggaaacgtacccaatttaaggagcatatccgttcggaattataaacatccttgggaaccgtataggctcaccgaagatgccgtcaattgtggcatatttataccgcatcttcaaaccttgaagctgatcaaagtggttttggattccggttttgtaaaacatatttgctcgataacgggtttaagaaccctagagttggtgcaagtaagaatggaatccaaacatcttcgaaggatcttcagtgcattgaaggatctgcaacgtattcgattggagtggtgttatttaaacgaggtaattacaacacagggagaccaatccaatcgaggtagcagcacgactgatgaagatgacgatgataaagataaagacaacaacgaagaagagtacaaaacggactgcgttcgtatgctacaggtacagtatcctgatcgaaggataacgaatctgcaaaatcgggttgtgcgtaacgtgatgcggccgcaaacgatgaaccagagggtgatgctgccacagtattggagaccgttttaaaatgtatgatttgattgctgtattaaaatttacaccagtaaaaatcgactcatgatatcc

SEQ ID NO: 1632 - DNA, 2310 bp, Aedes aegypti
ctctcctgtttgggatcccgacagtgacaactcgtcaccacgtagctcccctttggaagtgcttgaaaatcagtcagtgtttgttacggacggatttgttgttggtcgttttctccctctccaacgcactgcagtgaagggaccgtttttgcggctgagtgaacgagctagcagagaatcgccccccaaagccaaatcagccgaccagaagagcctttcatttctcggtactcggacgggattggtcgtcgtcttcgccgtcgacaggattttcgaatgagaatttgggacacataacaaactagatccccccaaggtcctcggcccagtgacacccatcagagtgaggacagtgcttgtgaaaggtgtccctgtttcttcggcagccaaagccggtctatgcgatacgtggaagtgcgattattttgttagtgttgttttcgtgatatctgcgagaaggatcgttttttgaccgagcgcagaggattctccccctagaaaagcacaaggatggccatcaaaccgggaatgggacggaagtcttccaacaagaacccaccctttctgagtcacgaattcgtgatccagaaccatgccgatatcgtgtcctgcgtggcgatggttttcgtcgtcgggttgatgctgcaggcaactaacgcactggccagcattttcattgccctgcaccacaacgtgaccggagccgatccgagccatgagaacccccagggtgaagcctactcgtacacctcgggctggaaggacggctgtgccgttttcttctacaccttgatctgcatcatcatgcacgccatcctgcaggagtacgccttggacaagatctccaagaagctgcacctgtccaagttcaagctgtcccgcttcaacgagtccggccagctggtggtgttctacgccatgtcgttcctgtggggcttcgacgtgatcgtccgcgaacagtacttcggcaacatggccaaactgtgggagggattccccgagcatccgatggtgttcctgcacaagctgttcttcatcatccagttggcgtactacctgcacatgctgcccgagctgtacttccagaaggtcaagaaggacgaacagaaggccaagatccagcacgctctcggcggtttcttcctgatcgctactgcctacttcatgggattccagcgtatcgccctggttctgctgaccctgcactacttctgcgagtttatcgcccatgcattccagctggttaacattttcgacaaggaggagaagttcacccgactgcgtctggttcacaacgtggtgttcatcttgactcgcttcgccaccatggtgttggccttcctgacgctgttctacggaatcgacaacgtgtcgcaaatcaaacgcagcttcatgctgtccaccgtttttggcctgcagggatacctgattttcgacttcatctccaacgtgctgcgatcgaagcgtgaaagctcaaacgaacagcaatcggagcgcctgcacaagccagccgccccagtcaagagcgaaaagtccaagaaggaacgcaagaaggaaagcgatctgcccgaagccgatcagaatgccgcccaagcctcgccagtgccaaccactggaaaggcctccaagaaggttaaagctaaataagtgagtccttattcatcgttcattttcaatttgtttttcgttctctacaaattacacagtaaaaagttaactttccgggaaactgcaaaacgcaaacaagccactatgcatggtagatttttttagaattttttaaaatggttatgtgctcaaatcgattctttcaaaagttcaattttttactcataacagtatagcgcatcgtccggcgctgtctgctttgtcacgcgggtaccagttgagttagttttttaagaatatgtttctgtggaaaagacttacattattcattgtccttatcagtatgatccgaacggaaggcgacgtgagtagtttttatatgcatttacagcaactttgatggaaagcatacagagggttgtgcggagaatcgtaccagaacagcaatagaggaagtagaaatagagtacgcaaagtgtcggaactgagcaagaaaaacatccgttagcgaattggtgagaaacacgcgaggttaaaatattattattactttttagacagagtctttatgataggtttatttttttcctttacgatttacacacaaattgggttcgaaaaatagattcggagtatacactttattttttgtatgttctaatgcaataattgaataaaaagctgacacaaattctatttaaa

SEQ ID NO: 1633 - DNA, 2259 bp, Aedes aegypti
ggaatggtgatcacaaacataagttttccgataaaaagtgataaattttagttttcccggtaattatattgcaaaatggcaaaagtaaagccgcaaatgaaacatcccaacaatgggaaacgtgtgaaagataaattcaaacgaaaaccgaaacagcaaaacggcggcaaacccaggtttaagttttcgatgaaggacgaggaatcggaaatcgcccggttgacggagctgtatgcaacggccaaaatcgaagaaacgagtagttttagcgattttccactctcgaagaaaactctcggtggattgaaacaaggacagtaccataaacccacggcgattcagcgggaatcaatcctaccggccctccaaggaaaggacattctggcagctgccaagacgggaagtggaaaaacgttagctttcctgattcctgtgtttgaaaaactgtacacgaaccagtggacaaagctggatggattaggcgcgttgatcataactccgactcgggaattggccctacaaattttcgaaaccgtcgccaaaatcggaaaactgcacgatttcaccactggactcatcatcggaggtcagaatttgaaagccgagaagaaccggttgcatcagctgaacatcataatttgcacaccgggccgattgcttcagcatatggaccaaaatccgcttttcgattgtacgaatctgaaaattctagtcctggatgaagcggaccgttgtctggatctggggttcgaatctgccatgaatgcaatcatagaaaatcttccatccgagaggcaaacgctgctcttttccgccacgcagacgaaatcagtcaaagacttggcacggttgaacttgcggaatccacagtacattgcgccgcacgagaaggaacagtacaccacaccgaccagactgcagcagaattatgtggccgtggagctcggtcagaaacttacgatgctttggtcgttccttaaggctcacagcaagcagaagatcatagtattcttcgccacgtgtaagcaggtgaaatacttctacgaagtatttcgtaagctacggccaagtacgctacttctccctctgtacggcggtatgaatcaggagagacgcaataaaatctacaccgagttctgcacgaagagcaacgtctgtctgctggccacggatgtcgcttcgcgtggtctggattttccgaaggtaaactgggtagtgcaactggactgcccagaggacgctaatcagtacatacatcgggctggtcgaaccgcacggctcaacaccagcggcgaaagtctgctcgtgctgcttccacaagaggaaggaggcgtggtgaagatgctcgagaggtccaaggtgccaatcaacaagatccacatcgatgataagcaactattctcgccgttgattaaaattcagtcattcttggcgcaatcgcctgaactgaaagaaaccgccaagagggcattcgtagcgtatgttaaatcagttgctttgatgaaggacaaaagcatcttcgatgcttccaaactggatttggaagcttatgccaagtctttgggcctgttggttactccaagggttagatttttgtccagaatggaaaacaaatccaagaaatcgaacgttaagaccgatgttaaagtggcaattgatgagaatgatgaggatgaaagcgatgaagaattctttacagttaagaaatctgaaagatttagcaccatggatcaaccggaagtggaagaaaacggagctcagccagtcacagaatccaagaagaaggttaccaaagtgaaactattgaagaaagctttggtgaccaacaagaagatcagtttcgatgacagcggaaacgctttggacgaggaggttcgtgatgaggtgtatgacatcgagaaggcccgagctcaattgaagctggcggatgctgaagacaaggagcgatacaaaaatctacagaaggccaaacgtgtcgccaagaaggagaaacttaagcgcaaggccgacgaggaaaacgaagaagaggatgactttggaagtgatgatgagcacagcgtcgatttgaactggctaccggatcctgataaggtgtacaacggtcatgagcaaggcgatgagagcggcgattcctcggcagaggagctgaagcccccagtttcgacgaagaaagcggcgaagaagcgtaagatcgcggacaaaatagatgatatcacactgacggaggccgaacagttggcaatgaaccttctcaaataa

SEQ ID NO: 1634 - DNA, 1954 bp, Aedes aegypti
ttctggttgatcctaccagtaatatacgcttgtctcaaaggttaagccatgcatgtctaagtacaaacagatttaatgtgaaaccgcataaggctcagtataacagctataatttacaagatcatttaactagttacttggataactgtggaaaatctagagctaatacatgcaaaatgcaggaacctcgcggaacctgtgcaattattagtcaaaccaatcgtcctccgtgacgctggagttgaaatctggataattttgttgatcgtatggtctcgcaccgacgacagatctttcaaatatctgccctatcaactattgatggtagtatagaggactaccatggttgcaacgggtaacggggaatcagggttcgattccggagagggagcctgagaaatggctaccacatccaaggaaggcagcaggcgcgtaaatacccaatcccggcacggggaggtagtgacgagaaataacaatataagactcttttatgacgtcttataattggaatgagttgagcataaatccttcaacaaggatcaagtggagggcaagtctggtgccagcagccgcggtaattccagctccactagcgtatattaaaattgttgcggttaaaacgttcgaagtttattcttgtccaacacgggtgctactcctaatgatggcagtaggtcactggattgttgcgactataagactgggtgcgcccgtcggtcctcgcggccggcgcggtcgtagtgtggcgctgatgcctttcatcgggtgcagtgttttccgcaagcccagctgctattaccttgaacaaattagagtgctctaagcaggctatcctacggccgagaataatcttgcatggaataatggaatatgacctcggtcttaatattcattggtttgtaatcagatcaagaggtaatgattaacagaagtagttgggggcattagtattacggcgcgagaggtgaaattcgtagaccgtcgtaagactaactaaagcgaaagcatttgccatggatgctttcattaatcaagaacgaaagttagaggatcgaaggcgattagataccgccctagttctaaccgtaaactatgccaattagcaattgggagacgctacattatggtgctctcagtagcttccgggaaaccaaaattaggttccgggggaagtatggttgcaaagttgaaacttaaaggaattgacggaagggcaccaccaggagtggagcctgcggcttaatttgactcaacacgggaaaacttaccaggtccgaacttattgaggtaagacagattaatagctctttctcaaaattaagggtagtggtgcatggccgttcttagttcgtggaatgatttgtctggttaattccgataacgaacgtgactcaatcaaattaaatagaacgctatcagcagtcagatgtttgataccgccggttcgggcaatgggcgcctcggtgtcccggcgctcggccggcggtgtagtgtgacctgataatacgtcaacccatcgtggttgacttctgcttaataggacaatttgtgttcagcaaaatgagattgagcgataacaggtccgtgatgcccttagatgttctgggctgcacgcgcgctacaatgtgcgcagcaacgcgtatccttgcccgaaagggccgggaaatcgctcaaatgcgcatttagtcgggattatggattgaaatggtccatatgaacctggaattcccagtaagtgctggtcattagctagcgttgattacgtccctgccctttgtacacaccgcccgtcgctactaccgatggattatttagtgaggtctttgaaggtgaacatttgctagtccctcgggattacatttgaatcgctgaagttgaccgaacttgatgatttagaggaagtaaaagtcgtaacaaggtttccgtaggtgaacctgcggaaggatcatta

SEQ ID NO: 1635 - DNA, 1905 bp, Aedes aegypti
atggattccggcaccgagttccgctcgctggacgatgcattgaagaacctggaaccgatggtgaatcccgtccgacagtatcgtaatcggaagcaacaacaacagaagaagaagaagtggaaggaaaattacaatggcggagctacagaggaacaagtagatcacggaggggacacaaaactggccgatgtcctgagcaagataaccagtgtgagtagcagcgaaaaggtcgaccgaaccaagctgatccggacttacaacgtaaaactgcgcctcaagaaaccctgcctgtacaaatgcttcgattgtgacgtttgtttcacgaatgccgactttttggaactgcacgaaaagtcccacggcggaattacggcggacacgtcttccggtggatcgtcccggaacgaaatcgatctgcagcaggagcaatcgttggacgagtcggaaatgatcgtaaaacagaacgcttggttcgtcggggaagattttgacgaaagcgatgaacaaaatggcgatgatgatgaggaggaggaaggaacgatccaattggattgcaccgttgaggaacgggaggacaacttcgacatcacgttcgatcggaccaagtgcgagaaaacctacacggtcgtgaagtacaaggtccggaaggatccggtcgggaaatgcgaactgtgcgagcggttgttctacacggtggaaacgctccagcagcatcggttggaacacgaacggttcctgaactttgaggccatcgagccacagattgacatcgactcgccgagcatcgaagaaagcacgctggtgctggacgagagcttctatcgagccgaaacggaggacagtgatataatggagacgagtgacagtgctctggaggtcgctggcagggtggaatcaatccgacaaggtggattgcgtaacggtgagtggaaaccggcgactcgtccaggctcgccaccatatcggattcctccccgggaagaagtagcaaccatcgaagggcggttccagtgtgaaatctgttcgaggcgctttcgtttccgtccggcttacaacgtgcacctgcgaacccacagcaacagccggccgtttcagtgtgtcgagtgcagccggaggtttatttccaggacgaaactgtttctgcattcgtacggacacagccggatccgaagggcagcgttgcggtgcgatgcctgcggggccacgtttggtcgaccgcgtcaattgttggaacatctgcagcagagacacgagatgccagtttagaaatcagggggtgagtcatttttagccgttgttagtttaatttaaatccgatatcaagagtattgtaagcttagggaaaggctctttaaaagagctgattttttttagttttagtagagaaacacagcaatttaggagaaggtgtacacaatacaccaaagtcccgtggatggaatgttgattgcattgcgcttactcttatccactgttagtggaatttctgattgtaaatcatagcatcttagatgatcgcttgttgttaaaacaaaactacaaaactgccagtcgatatacccagctgtccgaatattaaactttatgtaagtaagtagttacgaaattgaactgggtagtaataacgagctgtgctattctgttttgttttttatgttatatttgccttctaaatatgaacatcaaacccatgtatgatagttattctaattctaatctactggtagtaaactggaattgtattaaattaacgttaatcaatgtgccatacgaaaataattcaatcatgatgtgatgagaacgcgcattcgttttccttcaattccaccaacttctgctccacttagaatttggtctaataaaattagtgaattctccaggagaagaaaaaacgtacacgtaatg

SEQ ID NO: 1636 - DNA, 1638 bp, Aedes aegypti
atgggggtctgtttgtgcaaggataaggtggaagaaggctacctaaatgagaatagtcgcgattcgtacacggccagtggaaacgaatttggccaagatggatcgcatcacggtacgggacggacaggggggtcccatgataggggcaggtgcctgcgaaccgatcggaaagcatcgttgtcggataccgtagacgatttggtgaaggaaacgctcgagattataggatccatcgtggacaatgaaccagaaccacccaactcgatggttatgctgcatgacattaccgacaaaccgaccggttggatccagctagtcaaatcgctgattcgagtggtcccactggaacatccgatgggtccgagcgtaatcaccctgctgttggatgacagtccactgccaacgaaagactcagtggccgacatgataacgcactcaatcagacgcacgcccaaacgggagcgcaacctttgcgtgattctgggctgtctggcggagaaactggctggccccagcagcatagcggtactgtcggacgtcacactcggctatctgctgggaaatctggatgaaggcatcaatccggacgtgatgctgttctcactgattgcactggagaaatttgcacaaacgagcgaaaacaaagcaacgattaagcgcaagctggccctttacccggaaaatccactgtcgcgactcgaacggcacacggacagtaaagaattcattctcagacaggttggcttctgtgctcgatggtgccttgataactatttcctcatcgacggccgcaagtactcgtacgaagtggcggacgtcgacaacgtgaacgtcatgctcaacacccgggacgtcagcgagtacctcaaaatctccccggacggtttggaggcgcgttgcgatgcgtactccttcgaaagcgtccgttgtaccttccaggtcaataccggctgctggtactacgaggtgctcatcatcactcccggagtgatgcaaatcggctgggccaccaaagactcgaacttcctgagccacgagggctacggcattggggacgacgcgtactcgatatcgttcgacggctgtcggaagctgatctggcacaatgcccgctcgatgtctcacgatctgcacatatggaagggtggctcggtgttgggctgtttgctagatctggacgcgcgggaggtcattttcagtctggacggagtggaaggcggcgtgttgaagcaagtgtttggcagcgcaaaggatgggttctttgcggcggcctcgttcatgtccttccagcagtgtaggttcaactttggttcgacgccgttcgtgtatccaccgaagaatcgtcagttcatgagcttcaacgatcatgcgcagatgaaggaccaagataagattgtgcttccgcggcatctcttcctggagcagctacgaaagctcagcgtacgggaggattcgtgcacgctgtgcttcgacatgagcgcatcgattcgaatagagccctgtaagcatcgtgggttctgtacgacctgtgccgcccagctgcagttctgtccgatgtgtcgtgccgaaatcgttagcaccgtgcaagaggtggacctggacagccccctgtcggatgaggtaattgcgacaacctga

SEQ ID NO: 1637 - DNA, 1769 bp, Aedes aegypti
cagcagaatcaccaacaaattcttggttcataaaaaataattttaattgctgataataattactagcagaaatcgttcggtccacttcccagtgctagttatctcctacagcaaaaattaaaatgtaatgaaactacagtaaaacaggcgctgcagcggcaacaacgaactttggccgcgcttatcttgctttcgaatcgtgtggtgtaatcaatccgcagaggacgagagctgaaggaagtggccggtgaaaatgctaacgacaaagtactttttcctcctgatcctgatcgccgccgggttggtcttcatcgtgctgttccactggtttgcggccaactattccccggacgttatgggcgtgcaatacgggtcaataggtaattccgatagactgtcccaaactggtgctcggcattggcagacaatgatcaaccaggaagatcccgctcttaagacaataaactttgacgaacagctagtcgtcatctataaccgtgttccgaagaccggaagcaccagttttgtaaatcttacctatgatctctgccggaagaatgcatttcacgttctgcatatcaacataacggccaacatgcatgtgatgtccctcccgaatcagatccgatttgtccgaaatgtgacagcgtgggacgcaatgaagccggctttctaccatggccatttggcatacttgaactttgccaaactgggcgttccggcggccagaccgctctacattaatctgatccggaaaccgttggatcggttggtttcgtattactatttcctgcgctatggcgacgattatagaccgcacttggttcgacatcgtgccggagatacaatgaccttcgatgagtgcgtttcgcgtcagaaacccgactgtgaccccacgaatatgtggctccagataccgttcttctgcggacatgcggccgaatgctggaaaccgggcagcacctgggccctcgagcaggccaagagaaatctggtcaacgagtactttctcgtgggggtcaccgaagaaatggacgaattcatagagctgctggaagtggcactaccgagattctttaaaggagctacggatcacttccggaaatcgagcaagtcccacttgcgtcgaaccaaatcgaaggttgaacctcagtcagaaaccatcagtcaaattcaaaaatcgtccatctggcagatggagaacgagctgtacgagtttgccctggagcagttccactttatgcagaagaaacttcgcacgccgtcaggtaagggctcaatgcaagattttttctacgaaaagatcaaaccaaatcaaatcgccgctgctggtcgcaactagctttggaggtgggttgtgataagaggggacaaaagactccagtatctcagtgcgaagagtgtgagacggaaaaagggtggaaccggaaggatattgaacttgcgagtcttagaaagtagtgctgttgattagttggtaaattttcttgaagaaaagggtgtgatgttttttattcgttctgagaattgctaaactgtgtgaatgatttagaatgtaggaaaagaaaagaccgtttagaatatatttgtacaattagctggtaccttttagtttacctcatttatagatagttttgctaagttcattccacggcgtttacaacttttaaaccattgattaagcaagaatttcttcactaaaaagtcaacacatacaataatgaaacgatacaaaatcagtaataataaaacacttttatattgtcgaa

SEQ ID NO: 1638 - DNA, 4469 bp, Aedes aegypti
atgattttaaataccctgaataccagcagagacgatgaggaagctgctgatgagcagcagtcattaccacaggagcaacaaggaaattcgtcatcaagcagcagcagtaccagtagcgaagtaggtggcgaaacagaaatgatcaactcacggcctgcttcgattcaaaacgaaacggaagaggaaccagcaaacgaagcgaatcctccagaagaagcgacaccctctccagctccttcaacagccacgcgcagcagtagaacaccgtctgttgcatcgcctccccctccccctccaactacaaccatgagtgaaacagactctgaccgaggggtctcctctccggagaaggttgaaataaaagtagaacctgacttcattgtagatgagaatcaaagatctccagaggaagatcataacgaagtgagtaaatctccggatctgagcactgctcagcttcccatgcttagactgaatgccgccttggccgccgacccagcgaccaatccggacgcaaaagaccttaagaatatcacagccgccaacgatagtcagttcgagaagaccaatgagtccgattatcaaacgggtggcggtccaccggcgcaggcaatcatccgcaaacctatcaaacccgaaaacataaccattcctatcactgtggaccttccgcctcggataccaatgtacatgtgcagtccgtgtggcatacgcttttcgtcggcttctaccctggaagctcatcaaacctactactgctcgcatcgcaaagacgccgatgagaacaacggaggcgttaaaaacgcccattcgaatgaccccaacagttccgagccgccggccaaggcggccaaaacaggcaagcaatacgcttgtacccagtgttcgtacagcgcggacaagaaggtctctctaaaccgtcacatgcgtatgcatcaatcgtcaccagcaccgagttcaaacgcgtccaacggagacgacaccaccgctagtcaacagcttcagctgcagtttcaagttcaagctgcggctgcagcagccgccgccgccgctgcccttcaacagcagcaacaacaacaccaacaacagcagcagcaacaaccgccgcctcaggtagaccggtactgctccgattgtgatatccggttctccagtaccaagacctatcgggcgcacaagcagcactactgcagttcacggcatcgggatggccaatcgaacaacagtacaccgaagccgcagcacaaatctggttcacagagtcctccagatgttccgaaaacgcctccggtagcgccacagcaaccgttcctggcattgccaaccaacccaataattgtgattccatactcgttaatccgcggagccagcgtcatcccggcactattatcaaccctcgcaccgggaatctccaatccggaatcggcctgcttcatcttccagaacggagccctgcagccgatagcggtttctgcggcggcagccgctgcagcagcagccaacgcagccgccgctgccgctgtaaatgtacaacaggcatcgcagcatcagccgccgccacccctaggtaacatcggcggttccggatctcaagaatcttcgacccctctggatctatcggtgcgaggcggtaatatccgcgagcgatcgttatcgctttcttcagccatatcagtcgaacagcttcgcatggactttgacagtctgatggagggcaaagagaatctctcggtcagtggtgactccatcacgccagagcagatcgtttgtgcgccatcgcttcctggaagtcctccgctaacgccatcgccgaaacgacggtccaacagcccccgcggaggaggtggaagtggtggtggctccggaagcggagccggttctcgaagcgaacgtgacggctccgtatccatatctccacttacgctacagcagcagcagcagctgttgatgcgtcctctacttccggcggacattgctctgcgcctctcggcggctgatcccgcccttaatctcaatctcaatatccttccgaactcgcctctgctaacccagaaaggagtcgagcttgccctgcggctctcgtcgagctccaacagcaattgtgtagatcctacttccaagaacctctcgcagccgcagatgtctcctctgttgaacagcatttcaccgaccaacgccgttcaggttccggtccttccgagcactcctcagatattcgtcaaacagggtgactccaagtgcaaagagtgcaatatagtcttctgcaagtacgagaactacttagcccataagaagcactactgctccgctcggaacctggatcaggacggagacaatcaaaaaactagtcctccaatatctccgcaagcggcaagtccttccacgcccagtggcgccgcttcggggattggcggtggagcgcgaacctccggcagtggtcaaccggttgcctaccagcagctgatatgtgcggcatgtggcatcaaattcacatccctggacaatttgagtgcccatcagatgtactactgcccgaagcgggtcgatgtgcaaataccgacggccattgtaccgcagaaggaacgctgctccaagtgcaagagtatgcatgagcctggacagccctgcaccgtggccggtcagggggcttataaatgccccatctgtgagacgattagccctaactcgactgaagcgcgacgccacatggatactcacggcggcgtgaaggcattccgttgcacaatctgccgctacaagggcaacacgctgcgcggtatgcgaacgcacattcggatgcattttgataagaagacgaacgatttcaacgaggaaaattacattacgtgtatcctggaggaggacggtatcgagataccgccggcagcggctgtagcatccgcagcagctgcagcagccgccgttgccgccgcagccgccacaacagcccaactgatgaatcaagccgttgcagcggcacaagcggctagtcaacagcaactgccgccctcacggcacttggagaacaatagtaacagtccgtctgggcaacttcactattgtgaactctgtccttactattccacctacaaactgaacgtggcaaaacatatcaaactgatccatggtcgagagcgaccgcctagcaattcgccgttgatcggcgaaggaggtgaatctttaatcttcaacggagacagcggtaattcgactccacgtcctccagtcagcagcactccgggacccaacgtcaacagtctcatcaaaaccgaacccgaggacgaccgcccggaagaaacggacgtcgacgtcgatgtagtgctcgaagaacccgaagtgaccatcaaaaccgaaatccaggaccagccggcgaaccagctgatgggttcccctcctccgcctccccttgtcccaagtcagcccccgcatagtctgaaactgaaatccctccatccgattggagccgccggcagtctgaagacatccccaaatcatcaaaccaagactccctcgccgcctggctacatcggagagatcaaccatagcgggccgaactattgcgacgcgtgcgacataaccttcaactatgtcaacaccttcatagcccataaaaagttctactgcaagaacagccagcaggacaccggatccggagcaaccggaggagcaccggcaagcatccgagcggcctctgcgggctctccaaacaacgtagtcgccgtatccagggcaacggaaacctcagtctagacacagagcgcagcaggcgttgcattctgtcgggctcgtttccaatgcaacggactggagccttactttcaatgtgggaatagaggcaattgtatacggagaaacccaaaatttggaaggaaaagaatttaccaattcattcattaagtatacggttttatctgataactatatcacacaaatgggaaaactccctccgtttatgtgttgaactaagtgtataaagctgctcgtagatttagcaacggaatcttaacattcttaagcctaactaagcttaaaatataactattagatggattaatgttaaaagctcatacgctgtaatgataagaagaaaaatcaaacaaattaaatcgctgttccagcagaggaggtaacaatctgacactttggccctcttccaccttattttagattaattttaaataccttatttccgtatggaacacccttgtttttaatgttaggatgcgtttattaccaaagttatagcgagttgtttgtttttgtcaattttagttttatttttttccaacacaatacgtataacttccaatttgaatcaagacttaagcgatatttgcatttagtagaaagtagcctatcatactgattaagtgggatgtaaatctgtgtaaagtagcgaagcggaaacaaaatagtaaaacataagctcgaatttaacctaatcaaatcaaatagaattcataaacaac

SEQ ID NO: 1639 - DNA, 735 bp, Aedes aegypti
atggttccatgcaaactgtgttggtatcacagaaaccgctttgctctatcgagcaacattatttggatctgcgatacatgtatgaccctgttctgtaagataagagagcgaatacatgtcgatgcatctacgaccacagaaacactccgatcgaccgaggatgaaattgccgatctgaaatccaccgtaacagaaattgcccaaacccttgcgaatgttgtgcaaaaactagaagcagtaactccgtttcgtcactctacacctgcgtcgtcgcctaaactgttggacggatctgatgaaatcatctcttgcgcaagtctacaaaccgagccatcgcagtgttccgaacacatgcttagtagccaatcgttttcgatatatctcaccaacatcgatagcagtgtaactgaagacgatataaaggaagtcgatctctctaaagatctagccgattgggaaaagctcaagtcaggcgagaagcacttcatctcacatgtattggccttctttgtcgcttccgatggcagcatgaacgagaacctcgtggaacgtttcagccaggagctccaggtcaccgaggcacgttgcttctatggatttcaaattgcaatggaaaacgtccacagtgaaatgtactcgctgcttatcgatacttatattcgtgattccaaacaaagggagtacttgttcaatgccatcgataatctgccctgtgtgaagaagaaagctgaatag

SEQ ID NO: 1640 - DNA, 1334 bp, Aedes aegypti
atggacaacgctacgtttgtcgaaagctggaacagtatcataccgcacaagataaagccggctgatctggaacacccgacggagtcgtttatgtgccgaagcttggtcagcttcttccggatgatgaaatacgatgtttcggagtttgaccacatgtacaatgaacccaaagagtccactattagaaaaagggtacaaatagtggccaacaccaatcacttctaccaactgtgtatgggatcaaagcagagaaatttcctttacgtggacctgatcaaaccctcacccaagaagacgatccacgtgctgaacatcttgctcaactatctgttctacatcaacatggttcgagacgaaacgattgaaaaggccactcagtgcactgcaaggtatcacgagctggaagccaacatcaaccagcagaaacgagaaatggaaaaccataagatcaagatcaacaatatagagcaaaacatcagtaaaatgcgacaccagctgccacagctggagtccgacaacgataagctcagagagacgaagcagcaactgttggagaagatcgcggccaccaaagcagcagatgaagagttggcggaaaagatcaccaaactgaaaatggactatgccatgttgcaggatcgacgggtagacgatgaggaagccgctgctttgatacggaaaaacgaagaactggaggcagaaattgaagagtacgaaaagcaggaaaagacactgcaaacgaccaattctgagtatgcaacgctcatcagccagatcaagccgtgtatttttgctgcggaagagatcctgcagaatccacaggatgattcactgatgaaaatcaaaaaccaagtggacactcttcggttaaactacagtaaactggaagcagagtgcgctaggaaaacgaccacccttcaggcattgcagaaaaattgcgaagccatacgagactacgttaccgaagtggagaaacagctctcggtgggacacaaagccaaacgtaaaaccgaacgccaaacaatcagcgatctcggtaagcagcagatgcagctggacgaactgcacgaacagaacgatgtctatctggagcagatcaaggcactgaaagaggaaatgctgctgataatgcagatgagcgaacaggcgaaggcttttctgatgcgagacccggtcaatcggccgttgtcatccaagtagcgctcgttaatgcttagcacaattgtatagtcctgttcgtccctcttttgaggagttttggatcattgctatttatcaataaaaataaataaatatttattccggctgcgatcaatgcactaagccaatcaaag

SEQ ID NO: 1641 - DNA, 2139 bp, Aedes aegypti
atgttagtaacggatgtgggtgatgtgaaaatttataacctgagtgctggcaaggcacttccggactggatatcggacaaaaaacgtcgcgaagctcagcgcaagaaagctgacgtcagtcgtcgaattgagctgatccaggatttcgacatgccgagtgtggccactagcatcgaaatgacaccggatgggcagtacattttggctaccggaacgtacaaaccgcgaataaaatgctacgatgtgaataatctgtcgctgaagtttgagcgatgcttcgattccgaggtcgtgaagtttaaaattctcagcgaagactacagcaaagtggtctttctgcaggcggatcgatttgtggaatttcacgctgcccatggaagacactatcgattgcgcattccgagatttggaagagatctggactaccacaaaccgtcatgcgatttgtttcttgttggaacgtcatcggagatttatcgcttgaatacagagagaggacaatttctacaaccctacagcacctcggcaagtagtattaatgcgtgcgaagtgaatccggaacatcatttactctgtgttggaactcaagaaggcactgtggaagcatgggatcccagggacaagaaccgatgcggagtattggacgtggctgtaaacatacagaacaatgagaagtttccttcggtctctacgttaaaatcaaagaatggattgcagatggctgtaggcacggactctggacatgtacttctgtacgacattcgagcaaaggaaccactgctcgttaaagatcatcttaatcaacttgccgtgcgtaaaatcgattttaacgcggagaacaacgcagtctattcgttggataatgccatgttgaaaatctgggacgagaatactggcaaacagattgcctacattgaatcaaacagcaatttcaacgactttaccacgtcccctaaaagtggcctgttgttcttcgctcaagaagaaccaaagatgatgacgtattacattcccagtttgggacctgccccaaggtggtgctcgttcctggataatctcacagaagaaatcgaatcggaaagtgtgcagaacatctacgatgattacaagtttatcaccaaacaggaattggctgatctgggactggatcatctcgagggaaccagcatgctgcgagcatacatgcatggcttcttcatcgacatccgactgtacaacaaggccaaggccatcgctgatccattcgcattccagcggtatcgcaaggaaaagatcgctaaacaaatcgaagaatcccgtccagctcggctccagctcaaatcaaacttaccgaaagttaacgccgagctggctgagaaacttctcaccgagcaagagctgggaagcagcaaactcaaatcggctgccagcaatcttctgtcggatgatcgattcaaaaacatgtttgagaatcctgactttgcggttgataagacggctgttgagtatcgtttactgaatcccgttttgacgcggttggacaagtcccgggcccaaaaggtgaaagcaagagaggaagcagcagctgcggccgcagagagacgggaaaacgaagaggaggaaggcagcacggatgacgatttgttcagcgaaaaggacgaaagctccgatgatgatcagacttggacgaaggaagttaaaaaggagttcaagaaaattaatttggaaaagaaacgagagcggcagatggagttggatcaggaagaagaggaagaggacgacggtggtccttcgatagaggttcacgaaaaggaagatttcaatataggcagcgcgaacaagagaatcagcaaagcaggattgggtaagcggttggccgccagcaaaccgatggaagtgaaaatgttgggagggttgggcaattgccagatgacgttcagtaccgagcggaagaagaaagtattcgacaagaagcgacaggcggaactgaaaaagcaccgggaagaacgtaaaaaggtgatacggccgacgaccagtttgaagcgtttgtccaggaagtagaactttgggctagataggttaagagttgtatgattctgttgaatctaaaggtaagtttatgaagaatttaataaaacgagcgtttataaaagccattgt

SEQ ID NO: 1642 - DNA, 1879 bp, Aedes aegypti
acatctcctgtcgattcgaatacaatttcatatattttttttcctctgcttccattctaaacttgtcaactctgttcactttacatcccaacaaaagtatcatatcctctgcgttctattttcctatcgcctgttcacaattgcaatcgttcgaaagccagcattgaacaaaccttccattaacgtagcttgtttttttttattttataatatttattatgctcaatcggattcagatctttatggacatttactccacctcggttccctaatcgatattgtagccttgtgtcttggcagacatcatcacttagtgttcacttttgtctatttcaatcttcccggtcattgcctttttgtgttgcggcatgtgaattggttaatattcttaatatttgtttttttttttgtttcactacatttgatttcaaatataacattatctagggttttctttttgttgtgaataattgttctgattttgtttactatttatacatcttttttgctctttccttaaattttgtttactatttactttcaattttttttttttcaatccaaaacgtgaaacgattaatagataacaactgttctttcggattgtttgttctgttctgtattaaatccgttatttgaatttgttttgtcttttgctgggatttctgcatttttttcttttgagggaagggaagttctacacagggttctctgggttttgcttgtatgttgtgtgtttgtattctatcgaatcaaaagaagtttagatactacttgcttaagtgttctttttttagctttccatcgtttaatcctttctgcgcatataaattattggtattattactaaacaacagcataacactcttactcggggcgcgaaaactatgcatagtagacgcaatcagtccttcgtcagtcattcatcatcgctcgcgcatcctcgcatctactgccaatcggtaatagtagctatttcacttaaaagggagaatttctaaaatttacctaacattttgcctttcgattggttccactctccagcgaaaaacgctctttccatcgaaccaaactaccttaagcctagtatccatgtgtgtgtgtgggtgtgtaatgtttatatagatataaaagcacaaacgaaaaaaaacgtaggtttatcgataagtggacgagagtcgtctggtttgcaaagaatgggaaaagaaaaggaaaaaaaacaactaacaaaccataagtatagtgttacaaaacaacacaaccacaagtgaatcattatgtttcatattttggctcttattgaagttccaaagcatactttcagggattggacgaatcgattggatcattatatagctgatcgcaattttgtctctgttctctgatatgaaaaagttgatcaggtcaggaaccatgcagatcatggaagaacatatatttttcaaaaacccttgaatatctggacctttttttgaaacagactaatttacgggatcactgatttatatccaggcattgcagaattcgttctcatttgattatgaagcacgaccaaagcaagcgaagaaaaacatcccatctgtatcggcccatgaacggtaatgtttcgcaagttgtaacaaacttgatacataacagaagcgaacgagatgggtgttgcggatcatgattgttacaaagagcaataattgagagtctcagcaactctcttattcctatacctgttctaagaacagattgaactggctgacgagacgcctctgctctttatgaccaaggatcactgaatgaacttttgaactctttaggaagttttagatttcctagataaattgctgagatagatcacttaaaatatttcaatagtaaattgattgtt

SEQ ID NO: 1643 - DNA, 3026 bp, Aedes aegypti
gaatatgtatttgcttaatttatcaaactaaaatattatttcgatacattaatatatctatccaataatctcatcctaagctctacaattccgccttcagtttcctcagcgtcccatagctgaggagaacgttccgcagctgaatctgcacgttgccacactcgaccacatactccagggcccggccaaacttggtccgggcactttgcagcgtcgccggaatcaaaatcccaaaccacctgattggatcgatgtatcccgcttccttatcgaccggatgttgatccagggacagctgggcattgcccagctcgtcccggtcctcggtaagcgagttcagtgcactgaaatccctgtagtcctcggtcggcaactggactgctgaaacggattgcggccccttggtgaatcgagtgtgcgccaaatccagctgaccgtcgttggttacggcttcgatggtggttttcagcttcacctcctgctccatcagctccagtgagtggagcagcagtttgtccattagctggcacacttcgtcccgagttttcggcattttaacgtttaaaacctaaaatttgtgattctgatgaaatttgtattttctcactgatcacagaatcaaaacaatcatgtgattttgacgtttctcgttgttaatttctgcgtttgacatttcgaattttatagatctcagaattatagcatatcgtccaaacccactgccaagttgtcaatttagaaactgtcaacatcgaatttttgtgacacgcgacgcgagaaaagtgaaactgcacgtacgtaagtgaacagaatttcgggtgattttcggtgaattttccactaacattgtagcgaaccggtgcgagtagtgtccagcttcgccatgtccaagaacgaggcccgggaaacgaccatacggcagctgtacaccgagttgaacaagcaaggttccaatggggagtacgagaaggccctcaagtcggccaacaaaattctggccctggatcaaagtgagcagaaagcgttccagtgcaagctggtttgcttgatccagctgtccaagttcgaggaggtgatcaagttcctcgaccgtacgcaaccaccgtatgattgcaccttcgagcgggcctactctgagtatcggctgaatcaaccggaggccgccctgaaaacgatccagaacagtggcatcaaatcgttgccaccgaacctgaaggaactcatggcacagatcctctatcgcctggagaaacacgaggaatgctatgagctgtacaaggacatcattaagaacaccagtgacgactatgatgacgagagaaccaccaatttgagcgccgtagtcgccaatctttgcgtggatggttccaagaaggagcttcctgttctacgtgaggacacgtacgagctgacgtacaacgcagcttgtgccctggccgggaagcaacagttcccagaagcagagaagaagcttcgtactagcgagaagctgtgtcgggagtttctggaagaagatggcgctaccgaggaagacattatggatgaaattgcgatcatcaaggtacagttggcttactgtctacagatgcaaggtaagtcgaaggaagcttccgcaatctacactgatgcgctgaagcacaaaaccaacgaccatgcgttgacggcggtggccagtaacaatttggtggtcatcaacaaggatcagaacatgttcgattcgaagaaaaagatgaaggccgctacttcggagcaagcggagcataaattgacctccaagcagaagaaacttatcgcattcaataattgtttgttggccttcttcaccaaccaatcggattgtcacatgttggccagtcgtttgggtaacttttacccggacttggaattccaatcgttgttgattcgtgtcagtcagttggcacgggataagaaatacaaagatgccatcgaactgttggaaaattattccaaaaagcaaccgaagcaagaactggaggtcaaattcgccatcgttcagcttcatttgctggccggtaaccgaaaggctgccgttgaaattcttgaaagtcttggtgaagccaagtatcgtccgggagtggtatctgccttagttactctttatctgggtcttgataacaagaattctgcctccgctattctgaagaatgccgtcgagtggtacaagaagaacaagtctaccgctggcggtgaccttaccgacatgtggcgtcaagctgctagcttccatctacgcggtggcgaatccgaaaccgctgccaagagtttggaagaactgctcaagaccaatccttccgatatgaagatccttgcccagctagttatcgcttatgctcagttcaacccgaagaaggctcaggaagccagcaaaaaacttcccgctttggaaactctgaccaccgcctcggaaatcgatgccctggaagctaccaactggatgatgatcgccaaggcagtcaaaaagaagatgccagcctcgggcaaaacagaccaatcgccaggcactccgagcagcgagatcgctaaacagaagaagaaaaccgtgcgcaaacgtaagggcaagcttccgaagaactacgatgccagcgcagttccggatccggaacggtggctgcctcgctacgaacgttctggctaccgcaagaagcgcgatcgccgcgtgaaggaaatcatcaagggcagtcaaggaacggcctccggacaggcggatcaatatgacatgagcaaggcctacaaccagacgaaacagtcaccggctactccggccgcccatgagatgcctgcatcgggacctgctcctaggcagctgccgagaaagagccagcacaagaagaagaagggcaaacattaagccggttggtcagaccgtttccgaaagcatttacatgagtatgctttagaggtaagaataagcattgaatataatgttgcatctagaatatgtctgtaccgttttatggatgacattccttgataatccagtctgttatactagttagtgcatgcgc

SEQ ID NO: 1644 - DNA, 2784 bp, Aedes aegypti
gggagagaacaagggtagactcaagcattgtgattcataaaaaataaagaaatcatacaaaaagctttattaagaggaggaggacggaatgttttagcgttacgtaataaatgatcgctgccttgtctgtgttgtcgattttgtgcgggggtttacaaccaacatcgctgtttcgaagacgacgacgaaagcatcttctctccatacaatttgcaaacctgcggatgttacctgttgtacgtatcgcgggccatagaatagtgctttcccatcccatttcggtgaaactcgacaacgacgacgtcaaggaagaagactagcaacgagtttgcagctacgtacatctatctagcacagagcttagcgagagtgaaaagtactggcccctcttctatcccatcatcaacagtgcagtgtgtattattatttcacattcagtgcgagccaagctgtaggttgtgaagtgaaaagtattgtgcggtgacttcatttggatcgaaatcgtgactcctttggatctaacatctccgagatagtggacacgccacaatgaatgactccgatttgattgtgaggtacctttacctgggtactgatcagccattctacatccaaaagaacaggccattcgacttcgacgaaggatgtcgcattttggctccgatccgaaccctggcggaagcagcagctgccaatggggatgatccggccgtccggaaggcagcggaggccgtctcgttgaaggaacaaccggtggacataatcgtgcgggtcatgaacagtggatccctggtgcgcaacgacgagtgcctattcgtattggccttcatagcacgtatctgcaccaagcccgaggagaaacataaagtgtacgaagtggtgcctactctgattaaggagtcgaaagatttgttccagttcgtgcatttttatcaaacgttggcaacgaaatccgccggaaagggtttcggacatggcatgaaagtggctgttaccaagtggtatgacaaacactcggccgaagagctggccaagttgctggcgactgatcgcggatggcacgaatggggccacaaagacatcatcagaatggcgcacatcaaactggcggatgaagctaaaatgcaagttttggatgctgcatgcggtggcaaaggcgtgaaacgtcccgccaaagctaagaagtcggaaacaaatgatgagaaagcaaacgacaatctgaaagacgagcctcaagtcaaaagcgaagcactgaatatgtttcaacgtatgaaggagttcaaaagagtgaatgacgctgcacatgcttgtgatggcattaaaaattatcagtattcgtttgagctggtgccttcgcagttgtatcgagcagctccagtgtgggagagcctgttccctcgtatgtcctatcgggatcttgtccatgccgccctagttctgcaggattacaagctgttgaaggaaaccgatacgccattgtccgtggcgtacggcaaggtgttgaaccgcatgacttcggtgaccgaatcgaaggttcacccgattttcatctatcaggtgatgcgtctgtacgaggaacgccaacggtatctgaatgcagtgaaggaatctattcataccaacaacaatctggccctgaaaaactccaaagcgaacccaacagtaatgaaacagttctacgcagcgctgaaccaatcgatgctgaactaccagcggaccggattgcggtacctggtgacgctggatctgagatcgaaacagtcgaagaaacgcgtattcggcaaccgtctgatgtcctgccaggctgcctacgtcctgttgactctaccgatgttcaagcgcgagtcgcacatgaagatcctctcgttcaccgaccaccccgaagagctggtcgaagtggacctcacccgggagatggatttcttcaaagcgtgcgatcacatccagaatcacgctagcataaagaccaaagtcaagctgacgcaaccgatcgagtacgcaaccgagaacaagatgcccgtggacgtgttcatcacgattgtcgactcgctgatacgcgtgaatccgaagcgccaatcgccggtgctcagtctcaactcgtacaaccacaccatgaagcagaaggctcgatacgtcgtcgttagtttgagccgccatcagcaagatctgcaccacttcaatatgaagaacaccaagggagtgctagaattagtgggatgctcccaggaaacgccgaaggtcatcgatgcctacgtaaagcaccattttacgtaaactgcatcatggtcggcataagatatgttggcaagtcgtcaattgtaagtacccggaaagatgaagtctaattaatcatattttgaacttttttgtaagcattggtctcctgggtatgagatacttcaagtagtaatggttattctttttagtttgcgctatgtggtagggtagtttgatgcattagatttaatatttgaattcttataaatgtctatgcatcataaaactaatgggtaagggcatattttaatgaaattgttacacattaagaaaaaccgcttgataagctaagtaatcccggatattctgattagtattttgttgaagcaaatttattttgtgttaccgtaaagtgccgtaattcagcgcagttaacgaataaaacattttaaatgcttaattaaaaattagtaggtattgcatcaacaaaaaagctttatgggtggatcgctagcaaatctgttttagattatggcaaaaatataaactagactgtattcacacgtt

SEQ ID NO: 1645 - DNA, 4254 bp, Aedes aegypti
ttcgtcagcaatcccagctggtgttagctgataggtcctgagccttcagtaggtcatcatcaagaagaacggcaagacggcatacatcctcatttatgtgtacgatatggtgattgttacgcacgctgagaaagagttcgacgctattttgaaaagtctgcaagcacacttcaccgtgtccaacctcggtgatatacgtcacttcctggggatttaggtggagaagagcgacgccggataccaatcaagcggtgtacatctggtacagctcgtacataggttcaacatggagaatatcgaagactcaagctgtcaaaatcagcatgattggaacgaggcgaagcgggttctgcgctatctggcaacaacaagcgaccacaagctgcacctgggttcattgaaggatggactgcaaatgttcgtcgacgccgactgggctggaaactttcgcgatcggaagccgaactccgatcatctgctgctttttggcgaaggcgtcatcgcatgcggctcccggaagcagacttgtgtggcactgaggtacaccgaaacggattttgttgccctcgccgaatggtgccaagagctttgttggaccaggaggttattgaaagaacttggagaagttcaacaacagtcaacgaccgtgtttgaggacaaacagagttgtataaggggccttccttagccgactggtctgcggctacaaaacaaagccatgctgaaggtatctgggaacctacaaattatgtcccaaattctgaggtttttgaagtccctaagatttaatgctgtttgttgaacagtaataacaaaaaataaataaataatacatgttatgaaacgctttcaattttgatttaaaacctttaatttttgattataagtattaataccgatagtaatagaattatcaataaataatcattttaaattcaccgtagaactaacattagagatagagctgaaattaacttccctgtaactaaaatttaccgatgattcaaaactatttccaatgattttaatgaggtttccggtttcgaaattccaagtggatgaccaccctgttcgtcattgattgttacaaggtcgatgtagtaattgaatcctaattgcagtggtatcggtaatgaaatagtagtctggggaaagaacaaaaactacaacctcggaattggaaatgtcgaaggtagagacacgccagattgcatcgattacttccggaagtatcgtatccccatcgcgaagatgtcgatcaacgcctatcacagtgtgtttttgacaaaggatggggatgtgtacgccacaggacatggccgagggggacggttagggaacggagccgagaatacggtggcgttcccaatccggatagccgttcacacgagaagcgccgaggagcggatagtcgacgttagcaccggaaggcatcacacgctgctgctgtccgatcacaactgcatttactcctgcggagagaacaaccactgccagttaggaattaagccacccccggagaagcaattgacattcaaagagattggcgggttgcacaatttggcagataagcgaatcaaccgaataatagccaaagactaccactcgatagcggtctgcgaggcggacgtgttcgtgtggggtcaaaacgggggccaatttggcatgaagaaggaagtgaacccgggcaaggacaaactggcagttgccaacgtggacaccacaatcaagctagtcgaatcgagcaatgcagcaattgtagtttacaccaagtctagttatttgtacatatttaataattttaagcgaaagacatacaagaaccccctgatggagaagtttgagtgcatttccgtgtccggtggggagttcgtcacgaaaaaggaagaccttccgaagcatacaaaacaactgaggattttggccttcacggtttcaagaaacatctacatttggtatgaagactgtcagcagtttgtgcgatgtgtatttgcccagtcgaggaatttggaaattgagaggatcttttggtgcaacaacaacgccctggtgctgctgctgggaaatttgtactacggaaccataacgcacaaactgaacgcgcatgcagttactcaaatcagtgagtacacggagacgtacgcgaaaaaggagatgagcaccaccaccaagacaagaatcgagctgaagcgtataaagaatttgaacaatgtgactgattttgtgtgcgacgatgatggggagaattttgcagcactgctggaaaatactcgtcgctgcttccagatgccaaaactgctggaatccaactacgacttcggcaaccttctagccgaagcacacgaaatggacggcgttcacgatttaaccttcttggtggactaccaatccttcccggtgcacagattcatcatctaccaccgatgtcggcatttgcgaaagttagtcgaaaaacaacccaccgagaaggaaatccacctcaagggatacgaaggtctgacggcatccattttcgaacttgtgctccggtatatctacacgaatgaagtgctagcgaagggggacgtagaaaagttggttgggcaattacatccaggcggaacagtggaagagatggtcacgcggttgcgaaaggtgttcaagcagctagagataggggcacttaacgagtcgttgaagaagtgcgttcaagtattctatgatcctagcttagggaacttcccaaaactatcgcgtgattcctatccggatcttcgggacgtaaccattcgattgcaggacaatcaggagatcaaagcccataaatgtattctgatggcccgactcgagtacttcaatatgatgttcagccacacgtggacagaaagtaaaaccgtaaatctgactactattccgttggagtacatggaaccgattgtagatttcatgtacaacaacgactatcagaagattcgcgaccaaaagtattctgaaaacttcctcttcaacatggtggtaatttgcgatcagttctttatcaatgaattgaaatctctattcgaagccacaatcgccgatcggatcaatctgaaaaacgttggtgagctactcgagtacgccttccagtataactgcgatgtgctgaaggatctctgcatgcaattcatcagcgtgaaccttgccaaagttttggaaatgcgatcactggacaatctggaacctcccgttctggcagagattgacaggttttacaaggaattctatcaacttgccgcttatcggaccatcaccccatcggcggatgccatttcggatgaagatatggcattgtttgttggagattttaacgtagatctgaacgctaaggtgaacgaggcccaaacgaaaggcaaaacccctaaagggaaaataacacccaagagtacaaagatgcaacaagagaaaaggagctacgaaaaagaagccatgagttatattagggatttatcatttgaagaaattcctattccgaaaccggaagaaaagaaagccactaatgtaacgaatggtcacgaacccgcggtggaaaaagaagtcaaaagttggcataaagttgtagacaagaaagatcctagaaaaaagtctctacccgcagcattaaaagcaaacgaaattgttaaatatgagtccaaagtaacagaaaattactctaatcttcgggctctccttgagaaaggcacttcacccgacaaagacctgctatctccggcgactccagataggaaagacgaaggctacgactctggctatagcagcactcgacccaaactgtcgcaaaaacaacgcaagcgcctctcttctacctcggagaaacctaaagaactgattccggtcgcatcaccggaaataacccctgccaacccatggaaaaacctcaacaattccgcggccgatatcaacggcagctacgaacccacatcgtctctgacgaacgtccatgtccaaccgagtagcatcccgacgatatcctcccccaaggtaaccaccgcggagagcaaaccgatcaaagcccagaaggaattcagcaaaatcctcgatgacgaacgcaaacagaagcaatactacgagaaaatcaagtccaaatcgttggtgcacacgcagatcgaagaacgggccatcgaggaactgcggcagttctacaacgtggacagtgtgttcgatgagaacattaccgtcgagaggtatcggcccaggtccgatacggcagttaattttgccgtttggcagtatcagtag

SEQ ID NO: 1646 - DNA, 1642 bp, Aedes aegypti
gcgccggaatttaatttcataatctgcaccgtatacgaaaaatctgtccgccgcagccatgcagtgtgccgttccgagctgtccgggatgggagaaacaactggtaccatttccgcagaacctagtgctgcagagtcgctggaagcgggccatcgaagccggaactggtcttcggattccaatgtaccattgcggggcactttgctcgtggcattttggtgacgaccaaacgagaaatcccggggagtattgggaaccgtaccggttcctgcatcggaaaggtaaaccagtcgaagttggaagctgtcgattttgtctaaggtttgatgaccggcagaacatggtttcggacaaggaaatattgaacaatccaagtttggtccgattggttcggtatgcgctgaggatcaaactaaccgaagatgatatcctgaaagatgtctgcaaggaatgtgaatcgaaggtggaagtcgtagataagtggctaaagagtagtaagaaaactgaaatggaatataaagctttagagggcgctactaagaagatcgttttcaagaaagttggagcaaaagttatcgacgaagacaaaactccacatgctgcggaaaaggccaatgctctcagcatggaagtcgaaataatggacccaaaacttgaagatcatgaggaggacagtgagcatgaccaaccaaacgatcagatggaatcgattgttgaagatgaccatgtcaacacagatcacgattatgtggtggaggcattgaatgattcatctgagaatgctcaagttgtggtgagcgaagaaataatatccggaaggcccctggtaccagtggtgaaaaagtataacttcccgccaaatacacacagtaaacgtggtcctcaacgtcgacccaagcccaaagatacaggagagcaaatcaagtacagagagtatttgagcaagaagtgtagcatttgtgatactgttttggacagtccggaagacctggtagctcatctgactcagaatcattccaatggatcgccctacaaatgcacagaatgtggaaagtcattcaaactgattacttcctacaatcgacatctcggatttcacgatgaaactaatcgacccctgaagtgttgctactgtccgatgggcttcaaatacaaccacagtctgttgaatcatgaaaaccgccatcatggagctaatcatcaaatcccacagaagaagaaaccctccgagaagacattccagtgcatgaaatgtgacaaagcatacagaacgaactacgatcttttggatcacgatcggtatatccaccagcaacttcccggaacgacttgtaagctctgcggcaagcacttccggaaccgagcctcgctccggaagcatcatctggtgcataccggagatcgaccgtacgactgtccgcactgtgactcggtatttcgaaacactacaagtcttgtgcggcacgttgcccacaatcacaaggatatcgcaccggttgaccccaaggacatcatagaagagtcggatccttccttcaaatgtgccatttgcgaacagcagttccatacacaatccgagttggttcagcacatcaacgttacccacattggcatctaatataggtagatgtacgcttttctt

SEQ ID NO: 1647 - DNA, 1688 bp, Aedes aegypti
gtcgcacatcgttggttactggatgagacagggaagagccgatcccatcggaaggagcatgactgtgtagggcaaatcagttctctggaaaaacaatggatacttttccggccgcgtagaacattttcattgatccactggtgcagccaccggaagaagtaaaggaccacgacgaaacgcttggtaacaatccagaagatttccaacattagctctttgaggccgattatatgacatttgcttatcctgtcaatcccacacactagaagacacacccactaggtgaccagccaccaccatgatccagggtctcggttcggtgacgcaagccctgctcggcaccttgctaacatggggactcacagctctcggatccggaatggtgatctttcttcgaggtaatcaacgcaaatcgttggacatctcgctgggatttgccgccggtgtcatgattgcggccagtttctggtccttgctggctccggccatcgaactggccgaaagttccaacatgtacggaagcaagggcgagtttgcattcattccggttgcggttggattcctattgggggcgatctttgtctacgggacggataaggtcatttcgttcttgggaatcaacagccccacgatgatgattgcgctgacacatgccaacaaggacaaggcagacattgcgatcgatgatcaagtttcgtcgctagaacatggacgcagttcgtacgcaggtgttcctccaaacccgcaggataactcgttggcaatcggtatggagagctttgcggattgtttgaatgctcagcatggaaatgtttctcgcaagcgcagaaagggatcagttaaggagcaatccacgtacacgaacaccagccaaagtcagatcgatgcacaattgtcccagtggaaacgaatcatgctgctggtggtggccatcactgtgcacaacatcccggaaggtttggccgtcggagtgagttttggtgctatcggaacaacagagtcggccaccttcgaggcggcacgaaatctggccatcggtatcggcattcagaacttccccgagggtttggcagtgagtctaccactgcacgctgccgggttcagcctagggaaaagtttttggtatggtcaactgtccggaatggttgaaccgatcttcggagtcttgggtgcggtcgccgtcagtgtggcgagcatcattctaccctacgccctgtcctttgccgccggggccatgatctacattgtggcggatgatattctgccggaagcgcatgccagcggaaacggactgattgccacctggggaacgatagccggttttgtggtaatgatgtgcctcgacgttggacttggataagcttccgggcattggtgcttcacgcggttagaacgacaactaataagataatctactttgaccgcaacatgctgatgtgatccaaaaactgttggaatgtactttaatcgattaagtattaattgtatttgtttagaatgttacggaaaaccattggatatacaaatattagttgatttctagaaggccacggaaggtcgatgagatatgcccgtttgggtgtaggaacaaatgcgaagaaaacatcattttcccgaaattttattttattactatgaataacatgtacaaatgaaacccatttttagaatctagctatgaaccctta

SEQ ID NO: 1648 - DNA, 729 bp, Aedes aegypti
cgttttagctatgattttaagccattttctcgagtgtttagattcctagtgcgattaaatcgaattcctgtgcgcagtgtaattacaacgggagagattatgtgtgacatattgctgatgaacgggaactgcaatgggattggtcgcaaacgggcgcgatccgatgataccgattcggactgcccctttgtcatgcaacgcaagatgttcgtcaaccagattcagatggatcgtcgtgacgaacggaagatgcgacaaatcgaagaaaagaccgtcaacatgctattcttgggagcgaaaacgtcctctcgtcagccccggcaaggcatatgtcagcacgagtgtctcagacacgtgcgtctcattggagccggggagtacgatttcgatttagtgaattgcccgcaatggatggggaagaaggcggaccgcaaatgtcgcatctgtgatcgtcaatcggtggtccatgccgagtgcaccaactgcaatctggaattgtgcgagttctgcggaatcagctgccactactgcccggaaaagatttgcatgaactgcgtcaacctgtttaactgccaaacctccgatgttccttgctgcgaacggtgcaaaattttcaactagggttggaaattgtgatatctgtactattagctagagttaagttttgtttttttagtaggtgtgattaatacgcaatattatgaaatacaattttgatgaaagataaca

SEQ ID NO: 1649 - DNA, 2409 bp, Aedes aegypti
cgctgtgattggcaccgatttttttgggtgcaatgtgctgtgataatatattcaactagtaggttttaacagatatataaagtattttaacgacaacgacagcgcaagaagtgatcatgtccgtactaagattgtgcattttggggtctttattggggtgctgcattggatacgctattggcaaaccgtcagctcaatactacgacctccagccatatacctaccaatggccaccgccacattatttacctgatagctactactattactatcctaattactactattaccccaactattacccgcaacccagccaacctgatctgcaaaaaccgaatccggaacaatgtccaccatacgaagcccaaaaacttctccaagtctatcgtgttattcgggtgatagatttgttccggtcacctcccaagaatcccgataaaatcacgtcacttgacctgctagtggaacagttaaccaaggaagcactgcaggagcagctcattgaagtggtttcccacttcgatgggtacgatgaggttgccgaactggaacgaggttcaccggaagtagacatatttgtcgatgacatcgctcggctgttgctggcaatccaacgggcactgaatgcgttaaatttggatgaacacgttgaagatcttcaccgacatcagtatcctcgaagacatggatgctgtaaattacatgaagcgctctgtggtaagctgcgtaagcttcgggatcttgcaaatgcgttgactttggagcaagtcgagaaggaactggtgtacggaattaaggctgcggcaaaacaagaagtggattcggatgctctagaggatttggaagaagaactggagaacagatcattagacctggatgaggtagatacgaacttgccagtaattgaagataatcgagagatgaagtccaaagagggccagtttgaggaggcaacactggatgatctagccatagccttagagatttacttacaacagcaaaagatgctcgaggttcaacagcagaagagtgagaaagagaccgaatccattacttcgacaacaaccgtttcacctgtcagcacaacagtagaaggatcatggtttggtaacttgttcggaaagggtgacctctcgccagataatcgaactgtcatcgaagttgaaccgacaacagatcgcagtgcacagaacgcgtgggttcacgaagaagtcgtgggaaaacacgactttgaaattgataaacgaatccaagccccatcaaacagtgatccttcgagtacgatatctgctgtaactcattcggttccgttgtggttagtgaagacctccgaacagcctgagaaaaaagaatcggattctgatttctcgacccggcaagaagaggaattgcttagagagcttccagaaagcagacaggaggcagaagaagaaacaaaaacgaaaaccgacgctaaaatggaacaaccacatgcctcagaagccgtaaccgaaaaagcaaactcgcaaagcatcatcaacgccaacgaatcattgccgtccactttgaaaacgacttcatcaaaacccgctatgaaactattcatcaaagagcaaatttttaacgtcctgaaattgctggaggatgcagaagggttcactgagttaaaagagcgcatttctaacccggatgtggaccgattggcggaaagtttaagcggcgatgaagctggcattaagtggaccgatttcctaagtgctcttcaaaaccttgttgcggaaaagcagttgcacagtggtgacaaaattcgacaggttttagaaaattggaagacaggatccaaaggtcaactggacaatggatacttcaacaggacgtacgaagcagggtacgacatagaagcccgtcaactggtagatgacgaaggagctgagctaatatcgattccagaggaggagaatattggcgaacaagcagaaccggtgcctgaaccaacgcctaaaccattcgtcgacgaggtggataatttctttggcggctcctacgtttcaaacaatgatacctcaattgaaagtctaatgctcaacataacaaaagagcaagcctccagtaacactagttctgatgccgaggataaaagtccacgtattatcaacgtggataaaacagaacaagtgagctcttcaacgcagatattgccaacagctgaagtcgccaactcggaaactatcgagctgggagaagaaagtacagaaaaactggaagatacaacgccacagtcgactcctctcaatgaaatgaaatctgagacgttggagagatgaaggtataacgaaaactctgaatggggcagatctataaccgacaagtaaaataattatgtagtgtaaaaagttaataaagacgacaacagttattgttaaatgaaaa

SEQ ID NO: 1650 - DNA, 4595 bp, Aedes aegypti
attttcggagcagcgcagtcaaagtaggcagcggacactactcgctgtgttgtgtgcggattggatggtgtgagataagagagcgagctctgtgcttgcaaaagaagaaaagaaaaaacgtcgccttggttaaaaaacgcaccgaaaaaccgaaatttcccccatcttgtcgttgttggccgtcgttgaaagtggattctattgtgatttgatgaaacaatggcagtgtagaagtattgtgcgcatttgttgaaaaaataaaagttcattgtcgccgtggatgaagaaaaagaaaggtggttcttcgcctgctgcgtgaggaaggtgtgtgtttgtgtgggtaggaaagagttttttttttctgtttatttgtgtgtaacgcctgtacgtgtgaacaaactgtcaaaaaaagttcgaagccagaagaaaagtggtgcggaaaaaatagaaaataatgtacggcgctgtgtgaaacgagaagaagcagcagacggccgcagctcaagattgacgtgcaaaagaaaaggccaccatcaagacgacgacggctgctaaaaaggtggaaaggaggaatttttgcctctttttacggtacgtgctcgatttcgatgtgtgtctgaaagtgtggcggaggaaaatgtccgcaaaataagtgtcccgtgtgattctggtctaccggaagactgtccgtgtccgcatccggcgtcgttaagtgttaagtgtcccccagaaaaataagggaagctgctccaccacgttccgcggatattgtctccggccagagaaagtttttggggacacggctctgcagaagaagattttcaccttgtctctggcgtcgggacgcgagcgaacttgaaaacttgtctattttcggaggagccaaacagagcagcagctcctaaaaagcaggaggaatctccgaggagctagaggagcaggaggtggacaacattcaattgcgtgcgagatctctaagctactggctgcgccatctggaggaacacatcgccacctcctacattccgacaacggcagcaactgccaacaataataacaacaacaacaaaaacccaaccaagatggtcaacagcaatagcacctatttcatccatcctcctgcttcacaacagcagcaactcgttggtggatccaaccagaatctggcctgcaaaacaagcagtcaacaatcgctacatttcctcgcaacaggcccatggcagcaaattcattcgcaaccggcgcaacatcatcatcatcatagtcacaattctcaccaccacaacaacaacggatgcagcaccaattccggaagctgcaaccaacttccgcaacatcagcaacagtcatcgatttgcatttcgagctcgtcgctgttgtccaagtcacagcagagtctcaaccaagttgccagcagcagttccagctctagttcctgtcttgatagcacttcctcgcagctgctaaagaccaccaacctgctagccaatctggactggtgctcggacgtggtgaaaaagcaggaggatggcggcggtgggagtgggccatccttgatcggtgatggcaatggcaatcccggcagtgccgtccggggcatcggtagcgttgagaacgtttcgatgaaggaatttgtaccggttacattcaattactcaactccgcagggaaacaataaatccattgtgaatagcagtggtgccagcagtgctggtaccaccaccaatcaagccagcaagcaccatcacctaattgcgtcttctagtcaagcctccggtgtgctgctgggtagcagtgctaatggcagcagtttaaatcttaacggtagcaccggtttaggagctcacacggtggtactctcggatctggactcgagcgacgataatcatctgagctttagtaaaaatggaacggaaatattcgactacgattgtgattacgataacgaagaagaattcaattatttggcccgagcagccgccgctgttgccgcaggaggaacatcgtccaacgctgccaattcttgtaaatctggtgggacgaatgcggctggatccgctgcagttccgccatctgtttcgggatccagtggaccgaccaataccagcagtggaagcagcaatagcagtagcaacaaaaatcgagtttcgtttgatgctaacattagtgattacctacgagtccctcctattggacttggggaattcgatttagatggtagcggccagttgaaaaccagaagatctaacagtcttaccacaacggtaagtagtgcatgtgggctttcggttgggcaactgcatcagcagaagcagaacaacgaatgtttatcggcggaaaatctgagcaatctacaactactgcagaacaaaccgaggagtttctcgttaaccatggacagcccacggtcgtcgttaacctccagtggatcagaaactcggctggacgatttcaagcagcaccagttgatgaaaatatatggatctccgaatgttggcatgtctagcatagctcactggctgaagagtttgcggttacacaagtacgtatggttgttctccaatctgacgtatgaacagatgatggaaatgactgaagagtacttggccaatttgggtgttaccaaaggagctagacataagctggtattgtgcattcataagctaaaagaacggtacagtgtactgttacggttagagaaggacatactgaatgctgggggttctagggcccaacttagtccagtatttgatgaacttacgaatatcgtgttgactccgatgaaacctatcggactggaccagaaagaggatattgccgggttgtttgttaaattgttggacttgattgcttcgtttacattgacacggccgctctgtggcccacaagaagaggaatgcatgaatgttttcatttgggtgttggagcgggcgcttcataacgacgcttttgcggcccatactactcagataaaggagtacaagtacaaagcgaataaactgaagatggcttatgctcctaaaagccactacgctaagaataacggcattaacggaaatatgaataagccacggtggtctacaactatcaaacataaacccaatagtgcagctgatggccaaaaaacgccccaccgcaagagctccctgcagtattttactccaccaatgcaacaatcgcaatcatcacagcaacaatcgcaacaaactcaacaacaatcccaacagcaaaactcttcctcttctcacacacatcttcaagcaattccacaccaatactacggccatggaggtcataatcctaatgcaggcacgggccacaacaacaattacaacaagagttcgtcttatccgaactttgcttcgaacttatccagcagtagtggctctggaagcaacagcaccatcaaacatcacgtacagcatttacagcaaagtcaaagtcagcatccgctcccacagcaacagcaaccacaaccaccacagcaatcgcaccatgcccaacagcaacaacaatcgcatgtccctccacatggtaattttatgtaccatcgacattcgttgaacaacatttccgctcatcaacaccagcagcaattcttgcagcaattgcaaaaccaacatcagcaacaacagcagcagcaactgccagtgctgccttcgattttcctaactgcaatgggaggcggtggatgtcctccaacaaacaatggaaaatcccaatcgtcagaaacctcctgtcccaatcccaaaaactcgaccatgccgacgaagtccagtccagtggatctgctgggaagcaaaagccagaacaacagcatcggcgatataaatagtcggctagagtttctttgtttgcagatgaccgaacaggccatcaactagagcaccttgttggacagaaaagaaaaactagtgagtagtggtagtaattgttaaataggattgcgttgattaatttaggaataggtcgcgaaacgatgcatgcctctttctgcggaggcacgtagggatagacgacgatagaaattgtagattttttttcaaatcttgacgctcttcaagtctataagcttaaaactaaaaacaatggaagtaagcaaatcttataagcagataaagggattcctgtattttcaataactctatatataaactactcatctcattctctctttctctgatatacgcgcggaatgaggacgcaaaattaacgcaaaaaggtggaaactcttacgttgttgtagatttcttctcttggagacagaaattgattgttttatctatttgtatctgtttttaacatctaactttctgacgctagcggtctagataaggacgtcaaacaaaacaaaacgaacgatgtgaaaattgtgctgagaagtgtttcaatctacaataatcgataggagagcaaatgagtgctagggaatttttaattcagcaaaagcgggtacatttgaaagtggtagtattctctgttttactatttgtgtagcctttttttctgtcctatgaaattctctatgattttactatttatacaaatcgaaaagcctgttcagacataattttatacaaattgagtaaaataaa

SEQ ID NO: 1651 - DNA, 2360 bp, Aedes aegypti
gctatgcattgatttcgccgtgttttccgtgtgttcacccgttcgttttccacgcgttccactcccctgcttatcctgtcaaatcaggcgatgttttccacccgtactcgcgccgtgttgtcgaatcacaacacactgcagttcgcttcatccttgtttgtgggaagcatccgagagaagatttcgttccgattgcacgtgtaaaaggtgctccctgttggcactttttcttgttctgttgaaaccatggaagttgctccacagatgattgagaatatcaagctggaagacgggaccaacgctgtcgaggatgatgacttcgttgacccgtggacagtttcgagcaaatccaatgctggagtcgattacgataaattgattaaacgtttcggatcctcccacatcgacggcgccctgatcgagcgcctggaaaaagtggcaggaaaaccggttcacccgctgatccggagggggatcttcttctcccatcgcgatctgcacacgcttttgaacatggtcgaagcggggaagaagttttatctctacacgggtcgggggccatcgtccgagtcaatgcacctgggacatctcgtaccgttcatcgtcaccaagtggctacaagaaacgtttgacgtcccgttggtgattcaattgacagacgatgagaagaccctctggaaggatcttaccgtggagcaatcgatgaggatggcccgagaaaacgcaaaggacatcatcgccattggttttgatgtgaataagacgtttatctttgcaaacctcgactacatgggtcgttgctcggctttctatcagaacatcattagaatacaaaaatgtgttaccttcaatcaggtgaaaggtattttcggttttggcgattcggatgttattggaaaaattggtttcccagcagcccaagcggcacccgccttttctacgacgtttccgttcatattcggaaacgacaagcttccagtcctgattccttgtgcaatcgatcaagatccatacttccgaatgactcgggatgtttccccaagattaggatttccgaaaccagcgctgattcattccagcttcttcccggcattgcaaggtgcgaaaactaaaatgtctgcaagtgaagacaattccgcaattttcctaaccgacactccgaagcagatcaaaactaagatcaacaagcatgcattttctggtggcagacccaccttagaggaacatcgtgaactaggaggaaacacagatacggacgtgagctttcagctgctgcggtttttcctctatgatgatgatgaactggaacgtattcgcgtggcgtattctactggtgaactgcttagcggtgaaattaagaagattgctatcgaaaccctacagcccatcgttgccgatcatcaaactaagcgaaaggaagttactgacgaaattctggaccagttcatgactctcagacctctcaactatcaaatcgactcctcgcagaagaaaaagtaacagaagccaacgttcacagaggtcaaccttacgtactttacaatggcggacaaactggcacttatgttgagtttagattgcagatttctagcatgctgtacgtccatctaggtaattacgaaaattaccaccaacaggtagatatctgtagtctaactgaggtattactactgtatcggctgcattacacttgggggtcgtttgttatttattagctatttatatgcgatctaacacctgcgaactgcgataatttctattcactgaaaagctactataaagaataataacgtaaataagatcgttttcgttaaatatccagaaatccatttttataagattgacacaaaagggcacacaaaatccccaaaatcaaacattgaatcagtttctgtaaaaaaatatcatgttcgaaagattgggatcatctgcgacatcaaataattttgatttttttttccgctgtttttcaaccatttattaagtgaacttttaacatttttttagtttaaatcaaggaaaatcatgaatggaagttttgtatcctacatataaaaatagctacagtttaagtttctcatcgtttaatgtgatgaaattaataaatcaaatatttattgaattttgaagatattttcatattgtcattattaattattttataaaaaatctcaagaattcattggagaaattatttgtagaaatttctaatatagccttggaaggaacccttttaaaacatcagttgacaaaagtaatcggaatgaatcctgtagaatatgtttgccaaatttcttggaatataatattataaatttctgcgtgaaatcttccctagccacgatcactgggtttgacgg

SEQ ID NO: 1652 - DNA, 7134 bp, Aedes aegypti
ctgaattttatcgggatgcaaaatagtttcatattggcgtgactttaacgctcttttcgaaacttttacacccctcgtctcagtttgtggcgtaacctgtgaacggcctgcaagcgaaaagttttttgttgactgatgacgatcaataatcatcatcattttataggagattgcggcgaaaaaggagtttttcctcgctcgccgtcgtcgccgtcagtgtttttcgggctgcggataaagtgcaagttttctgattgatttcggtcgagttcggtcgcggaaagtgtgtgaatcgcgaaagtgcgtgcgcaattaccgcaatcggtagccgggtggttcgaaattgtggatttgagccgataaaagtgaatttaaaagtcgcccattttttgtgtgatccccacagtgagagaaaggaggaagaaaaaaaaaaggttcacacagcattgattatagcaagacggggcggtgcactgctgtgtgtgtgcgtatgtatattcgccatctgaaagtgcattggtgtgtgtgaatggtcggcgcagacatcgaaagacacgggagcagcgagagattaacccttgcatggccttggttgtggttgtgcagcagtgaataaaaacttcaatctgctccgcttgttggtgtttttgttggaagtgaatggaataaaatcacttttccactaggattgtccttagcgtcaaggacctgttaagctgaaacaatggtatcacgaagaaaatcacatcacggttccgaaagcatcgtccgtcatcagcagatataaatctagtgggacggatactctcctctggatcttcctgttcgcttggctctttctgtgccatttctccggcatcctttctgcctacgtctttcgtcatctgataccgagactgttttcctccgctggcggattgtgagtcgataggaaaagaagaaaggccacagaaatcacgtgtcggcaaggatctttcgggccaatacaacagctgacacgacgccaggagggaataccgcgataagacgcgttttatcagctatagatatacaactttgcggcgttggtcctgaaatagaacccaacatagtcattagtttgtaagtgatttagcccaatattggtggtgtcggatcaagcgaagtgctggcttgcgcgaaaccaaacacgtaggtgctgtgtaacatttgtaatctccgatggcaggaagcatcaagcaagaggatgtgtgctacgtcgtagctaagtatgattatgctgcacagggtgctcaagagctagatctaaggaaaaatgaacgctatctgctactggacgacagtaagcactggtggcgcgtccagaattcccacaatcagtccggctacgtgcctagcaattacgttaagaaagaaaagaaatcggtttcgctcttcgacagcttcaagaagaaggtgaaaaagggctcctcgggcagcaaaacgttaccgaactgttctccctcacgacaagttgacagtccgacgatgaaccggaggttaccgccggatccatcggacgcgattgcttccacccccataggaactgccatagttaagtataactaccaagcacagcagcaggacgaactgtcgctcatcaagggaactcgaatattgatcctggaaaagtccaacgatggttggtggcgcggccaaagtggctccgcgacgggttggttcccgagcaactacacaacggaggaaaccgaagacgacaccgtgcatacgtatgctatggcggaaaatgttctagatattgtagtcgcgttatactcattcaactccaacaacgacacggaactgtccttcgagaagggcgaccgtctagaaattctagaccgaccggcaacggatccggaatggtataaagcccgcaacaacaacggacagatcggattggtgccacggaattatctgcaggaactatccgagtatctggcgcagccctaccggggtaacaatggcagtgggccggactcgctggatcgacggccaaatgatcaacagtcgaacaacaacaattccaactccgccaatagtaataataataacacccaacaactggaccgaccaccgctgacgggcaaaagctggtactacggtgctattactcgaagtcaatgtgatacggtactgaacactcacggccacgatggcgattatcttattcgggatagtgaaacgaatctcggtgactactcagtgtcgctgaaagcgcccggacgcaacaaacacttccgcgtgcatgtggaaggcaacatgtactgcatcggacagcgaaaattccacacactagatcagctagtggaccactaccaaagagcacctatctacaccaacaagcagggagagaagttgtacctggtacgacccctccccaaggcaaacggcacctaagaaggaccaccgcccaccacgacagagctgatgcacaatagtcgtcgcatttgttggtagtcaggtaagcgtgcgttttttatgattagtttatatgagacaaaaggcaaaacccatacgcatataaagctaagttgaaaatagagggacgtaatttaagacggaaaataacatcctttgaaatgatatttcataaacatcttgtattgataattattataattatttatttatcaaacttttgaacgagaataccccgtaaaatacaaaagctgaaacaaatcacgaatagagaaaaactgactactaaatagtgtattaaaaggggaaaaaaataatatactcgaggagcataatcagaatctagtgacacgaaattgaatgtatgtgagtattataggcgaaacggtgcaagaggcaccatctttagtatatgcatttaagcattatgctattaataccccagcaaactccgaatagtatcctatcaagaagaaagtatgtgttattatatcaacgcagaatggcaattatccagtcacaaattcattacgcagatgctacaaaaactgaacttatataacaaaaaaaacacagaacacattttgaaacaaaacataacggtgcagcttccagatatttattactactacacatatgaatggaatatataagcagagtaacccgtataaatggatgattccagcagatgtcataatccggccagagcactttgaaagcttgcatcccgtaattcttttaactgcatttcacactggtctatagcatatacgtgctgttgcttttgaatatgatagaaaatgttattagtcacaatttgcgaaaggatttaagttttctttggtttaaaaactttagaaataactctgattttagtaatctcatggaaattgttaacagcttaatgtttgaagatttaatttatcaattttaaaaacatttttttacagtgatcatatttttttttattctacttatgaactccgacatttctaccaccgattcgattttagtagtttaaaactctcactagctactacttttaatagaaaagtgacatcggagtttgaagtttttattctcttcaagcaatgataaacattgcaaacaacgtagttgaatgtaatgtggaaccaatcatttggcgtggtgaatgtgtataattcaatgacaacacccaacacatctgaacctttttaacctttacaagcttaccttcgggtagaagtctgttccatttggtgcatgatggggaaaaacttcgaaaggcaaaactcgttttcaacgctgcattacctttttcgagattgagacgtttattttcagtaaacataggtttcatatgaagcgagagagctttgaatttgtacataaaaatcgaattgattgaatgtaaccttttttcaaaactagtgttagtaattttaacttgaattgaatttatattttaacgtaaagtcattctaattatgagtattataatattttccttctaaagcaagagttatcgtgaaaattgacaaggccttcaactcaataaagacgtagtacatggttgcaggtagagaacgaggaagacctaagttgttgttcaggttgttttcaacttcattgatccactcaaattcgagatttgtttcttgaaagaaataaatatacaaacattgaatgcccccatgtaacatcaaccttccttgtgtattgagggcattttccaccaatcaatgcaagcaattttccgattttacctatttttttctcatagaattctctacagatttctacatgtattctacgtagaagcatccgtccgaattttgtttttataaattgctctaaaaatttgatacattcctttatgattcctttagtcacgcctccatagagcccttcaaatatatttttctggattcctcaaccattttttaaacaattccccttataattactctaggcaattctacaaaaaaaaaaactgtatcttgcacgtatttctccatcggcgcctccattatctgccttataaattcgtactgaaaatcatccaggtatttcatcacgaataatactgactttccactaagaatttctcgagggattccaccaaaaactcctctcatgatacctgtgagaattccttcaagattttttcagtggctcttccaaaaaaaaaccttgaaggaattactggaagaatttttagagacattcttggaggaatctttgaaaggatttctgaaggaaatgaaggaggaataacaggaagaattcctgaaaaacaatccaagaaagaatacctggacgactctcacgaggaattccattaaaacttcctaaagagactattggaagaatctttggcagaatccttagaggtgtagatgaatttatgtacgaatctctggataatcttatgggataatttttggaagaatagcgccaagcatccttgaaataaattcagtagtaattctggtaagaaaccgcagtagaattcctggatgaatccctcgagggaattatctgtttttgaagatatgccctgggaaatcccttgaggttttcttgaaggaatctcttaagaaaatcctgaaggaatctcaggagaaacaaatggatagaaccttgaaggaatcactgaatacatttctggacgacttccggaagatgtaccagaagcgctaactggaggaaccgtttgaggaaatcctgaaggaaccttgtaggaatttatgtgcgaatttctggagaaattctggaaaaaatccaggaggaattgttatagaaattccttgcagaatccctagatgaaattgtagagaaatactcggagggacgactgagagaatatgcagaaattttggaaattatcctctgagaatttcctagaactgtaggaattgatgaaaaaactcctggagaagttcatgaaactctgcagaaattggtagaggattttttttgagaaattcttagagtaatacaaggagaaaatttggatcatagaaaacattatttgaaggatttattacagaataacttctaaaaaagaaggaataactgaaaaattaccttaaggaattcctggagaaatatcgagaaatttctaaagaaatcactgcaggaatctttggaagacttactggaaaacgaaaccctgaaagaatcgctagagtaattttacgaatacttcctaaataaatcttttcaagtactcatataagcatccctagggatttcagaaggaacccttagaagtatcattggaggaatttcagtagatctctagagaaatttcatggaggaatcctagaagcattacccccaatatcccaggaagcattcatagagaaattcttggagaaatttttagggatcaacctaatgtagtctctgatggtattcctgataggttccctggtgaaatgttggttcaaaaataattttttgattgctttccaaagtaattggccattttggacccctaatgcataatgtgttacttttacctaattttctaatgagccctaggttgttaatgcagcttggaacatttgtgattggtaacttgtttcttgtgaagcatgacaacgtattgaatgtacctacttataaaaatattacttttgtttaaaaatcagacaatttgaatctctaaagaatcattttcacacaatcgccccatgccaactggaacaaactccttggaaataagcacaaacatacgtgcagtaatgaatactgataacaataagaatggatttatcggcgctaaaacttttcttaatacattgcaattgtggaacgaaattattagtataaatcagctgggtaatgatagaagtaataaatcactctcgcgtgtatggatgtacgtattgtattatcgaactctcacggattacaggaccccgagcaaccccgaggttgcgatttttgtggacgccttttttgtactacgaagacgacgacggtgacggacagtgaatctaattcaatcgaaacaattcgtcagcattacctagtagtagtagcagcagtgttatagtgcatatgagagaagtgagaccgaaaacgaaacgaaacaagagtcacaataaggctgattccaagaacaattgtcatcctataagataaacattgaatatcgatcacatcacatcattcattcttgcttgttgttgcacgtatacatcagggtagtttagaaaaggacacttttgagcatctgcagtttacttcctcaagaaaaatgggtcaaatgtgcttgaaactgatacagcaaaaaccagtttgtacgatttgttcttaagaatattcagcaaagtctcagtcatgattcagagccctctttaacctttcagctgtcgcgcgcatttttataacgcaacatttttcaacatggaatacctcgtgatccagatttaatatagaaaaaaaactatctgttacaaagttgttaaggagatcaagggctacgttctggtgaccaaattaaataggaattcaaccgctggttgacgctagtgagtatgaaacttttgttttgcaaatatctcaggagcctgactatttagaaagatgaggtcttcgccaaagttgttcagtaaaacaagggctatcattgcccgagccacatgcttcatattttgccaccaggtagtgctagtgtgcatggaactcagaatatctcag

SEQ ID NO: 1653 - DNA, 5293 bp, Aedes aegypti
tcatgaatggtttcacgatccctatagtgcaactttcgactctgcttcattttaaatcgctagcaaagtgaaacgtacatcacggactgagaacccttcaaacaacaatacattttgatgagctccctcaaagccgcgacttggcgtactggcgtggtagaacacagtacacaaaagtacgagagaattatcgtcatcgtcatcatcattctgatcatcgtcagtcaaccgactcggtgccgtcgagaattttattgtagaaacgacgactacgcggcgcggcagctccacaaacatccatccaacgtaccaagccgcagtcaccagaagagcgagaatatgaaaaataaattcgcgaatcgtatctctttcagtacgagacttcatgtcgctcgattcggatctaattcgtcttccgccgtgtggttgtttgaattgaacggtttgtggtttgtcgtcccttctcccatttagttgaaatactccagatccagacctgccagatccgatttgatagatctacgcatagactacactgccgcgcctagaatctacgcgtaatagatattcctgagtgccttctcgttccgtagtcatacgccaggaaaacggaaactcaaaaaaagcaaattagtcacactgccacctagttttcagtgtttgctagtgttacaaaacaagccgggaaatacgccagtagcaatttggagaacacattacctccaggaagatagaacttgaagaggtattctacaaaaaaacaccatcagtgccttaatgtagaatctaccggtctatggaagcaggggagcgccggtgtagcaagagaagaagcagtggagccgtaaaatttaataacaatttcgcgcagcattctgctacgagtttgttgctgttgttggttgttttgttgctgactatgaaataacgagaataaaagtgaattttcggtcggttggcttcttttcgccttccctttcgattgctggcggcggttgatgcggttgttcagcgacacgggagttggctagttttgttgcgttcgttcgttcgtctgtttgttgatgcctacctcaaataatatccacaaaaagtaagaaggtgtctgtacataaccaaaagtgttgtgcggtgtgtctgtcgatcgtagattctcgcgtcgaaagaagaaccctcgcgcacaggaagagagcccggcagattgtaattatccgccttactataaacatacatctggtaaggtgctgcgtgttgttttcgtgtttctccgcgtatttgatgacttcgtagatcgtgggtcggaagaagacgagaggtgcacgagaggcttagctttctatatacttttttgggaatagaacattggatggtgtttttgcgagtgaagaagtgtagtgccccaagaattccggaattggggaagaaaaataaataggtgcctttgaacaattacttgctagaaggattggctggtggacaggaacgctggagccggtggccgagggagcccgaacatgatggacagttggatgcaagaagtggtttccatgatggcaggcgatgggacgcccgctcgaatcaaacaggaattgattgaaacctcctgctgcagcccatcaccgtcgtccgggggaagcttgtcgcagaatctgctctacggcacttcacagaatgctaagatggactacaaatgctccagcaacaacgacatcggccagctaacggaactgcacagcggaggctccgccaacaacggtggtccacactctcccggttcaccggatcgacagttttgcagttcgacgacctcggcgatcggtgactttggcagcgacagtacgaaccaggatgcgataaaggaagaaatacctcgccggttgtgtcttgtgtgtggcgacgtggccagcggattccactacggtgtggcaagctgtgaggcttgtaaagcatttttcaaacggaccattcagggtaacatcgagtacacgtgcccagctagcaacgactgcgaaataaacaagaggcggcgaaaagcgtgtcaagcctgccgattccgcaagtgtcttttgatgggtatgctgaaggaaggagtccggttggacagggtacgcggaggacgtcaaaagtatcgacgaaatccttgcgccaatccgtatcagcttcagctgactcagtccagttcgcagtacacaccgcaaacgttggaagatatcaaaattcttgaagtattatcgtctttcgaaccggatccactgaccattgggcacggatttgatcttatgaacagtaacggcagcagcagtagtgatcacgacggtgacggcaaggctactgactctcgtatgcccatgggtgccgacgcacaggagatgcttagcgtgcttagtgatatctacgacaaagagctggtcggtgtgatcggttgggcgaaacagatccccggcttcaccgatctgcccctgaacgaccagatgcgattactgcaggtcagttgggcggaactgctgacgctgatgttagcgcaccgatcgataccgttctctggtaagctgtactttgcgactgacttttggctcgatgaacgatccgccaaagagtgtggcgctttggatttatataatcatctcgcgcagattacccaacgactagaaaagatctcggcaactaaagaggaatactacctcctgaaggcgctatctctgtcgaactgtgatatccggttggataactacggcgcgttgaagaagatacgagacagcatcctgtatgcgctgaacgactgtgtactgctgctaaggcacaaccaagcagtttcccatcaacagcagctactgttgctcctgccctcactccgccaggccgactacattatccgcaaattttggacaaacgtgcacatagagggcaacgtcaccatgaacaagctgttcgtagagatgctggaatcggtatcgcgataagccctttgcgtcctcgtgagtgaattaagctatactttgtaggtgctcaggctcaccctccgctctgctgcggaaatcccggtgatctctatcatcacacacgcatacacactatcacatactgacgacataaactcatccaacgagaagaagtgacgaagaaaaaatagtagacactaacatcccatgtttcccgtagaacgccccagtgcttgacttagtgcgtttccttctaacgcaatccttctagatctgtaggcgatctaatcgtgggaagaagacaggagggtgcagtttgaagcaatgaaaagttttacagtttataaggtcgttacgttttttttaccacacattagaaattgtaagagacattagtcgttaagacagctcgaggaaatgtgtaccacgagcgtagttttttttaatcgaaattgtaccttttcttttttaacttcaaatttttaaatgtgctaccctagttcacggcaatgaagtcaatgaaaattacggtattcggttttgcttattgaatctccaaggcgcgttttctcttctattgcatcaatttgggtgaaactgcccttcaagttcatcatacttattaagatttctatcccgtgattaccattactagctttaagtagtcgatccgattggtaaagtgcaggaaaacatctttgaacaagcaggatgtgttttctttatggcaaaataggcagcatgcgtgagtagacctagcgaaagagagtgccctcaagctaagaagtttcagcgaacatctagccttttatcgataattttaaagaattcctaacaaaaattgttcacatatttttaaaaaccacttggaattcatcatatttttcactttaaatgtttaccacaatgccagaagtgtctcttaaagttgcataccatactgttcaggctcagtcctttcaattcaggctttgactactcgtcacaagccaagctgtcaggagataaacttcattcgatcgaaataacctgcagaggttatgtggcccagagagtcgtagcgataaacgcgcagcgactcagcaagaacaagctgaggattgtaggttcgaaacccagctgtcgagagtcttttcgtaattcatacacatatatatatatgcaaaaaatgatcatttggcaaagaaagctctgagttaacggctctggaagttctcacataacactgagcgtagaagtttgctgtaccccagtagggatggaacggtagagaagaagaggaagtcctgcagagttcgaagtagaaacgatcaactggtgatacgcctttagattcaactgctggttcattatcgtggattatcagtgagtctcagtagacgaatccgtcggccacttcacttgagactgcccatgatagataaactacacccatcactcggtccatcgtcgctttgatctataatagctggtcatgatcgattgtgtcgtatgctgattcgaaatcgatgaacaggtgctgttagggcgaacatcttattctatgtaatgcgttagcccatgaattccgcccgctattgctagtccttgcaagcgatggcagaaaacgatcaagtatttagaggcagcggctcagtagcttggtagttactacaatccgtcaacttctttgtaggtgggatacaccaattcttctattcactcgtccgataaagccttctcatcccaaatcttgacaatgacatagtgcagtactgtcgccattgcttcgcatccgtattttagtcgctcgccgatcctgaaccgggtctccttttccaactcctgcaaacttgaagtatcgttctctacgcgtgcttcaaggttcgcattcgttgccagtcatgtcaccgttcaggtgttcattgtagtgctgccaccacctctcaatgaccgtggttatctttgtagctttcaacttacggtattggctgctaccttacgaggaagggccagcagaagtagcctcgacaagctaaaaactaaaactactggtcaagaaattataagaatcacacaatgggatgcaaaaaccaaagttggggagcctttcttagcttcatggtaacgtccagggctacaaagcaaagtcatgctgaaggtgcctgagtatgattcccagacggttcaggatagaagattctgaaataggaattgttcaatcctaaaagaggttctcttcggatgggcagataataagtgagcttcgagttaaactaaaatagctttattgaagaattgcttataaaacacatcttgtttgcttgaaggcttgttgtagaatgattaaagtttatgacacgatcggatgcctc

SEQ ID NO: 1654 - DNA, 1497 bp, Aedes aegypti
atggcttcagcccaacggatatgtcgcttgtgtttggacaccaaagatctacagagttctccttcgctttacgatgggattatccaggcgaagattatcacaatatttaatttcccgttcgatagccgcgcttcgttgccatccagcatttgtgcgcactgtctgttcaagattgacgacttccatgaatttacggaaacggtgcgtcaaaatcaggaacagctcaaagcccgggaggcgatcctagcccaaaacatcaaggtagaaccaacggtggcgaatgaggatcccgcagaggtgaaagagcccagtattgcgatcaaatcggaaaccttcaatgacgagcctccagttgagacgattccagtccaagtcgaacatggcgaggcccgtgttgttagcgtcgattcaaatcaatgcatcgttcagagtcaccaggacgaaacccttcagtttaagattgagtttgaagaaccggaaatccccagagataaggaatcaccggttgaagagatcgacaaaactgagaaggaagaccgcctaattagggaattctttagtctcaattgtgaaacatgctcggaatcattcgatagtttcagtcagctgaaacagcacaccacggttgtccacgataagaagctggtcattaggtgctgcaacaaagacctaactcgaaggtattacgtgcttgatcacatcgcgttgcacctgaacccgaatcatttccagtgtgaagtttgcactaaggtgtataaacggagaaccgatttaacccatcatcgtctcagaatgcacggcggggaagaggcaaggcccttcaaatgcgaccaatgccatgcttcgttccctaagtcatacttgcttaatgctcatctctccaaacatgttcaagttgagtgcgacgtttgtcataaaaagttatcgaatccggtttccctgcggaatcacaagattcaggtgcacagcaagggtaacaagcacgtgtgcgacatctgcggacttgaattgagcagtaagccggccttgcaacgccacaaggatctacacaaaccggtcaaaccagaggaccggattgcatgcccaatttgcagcaaatggttccccagtgcagagaaagtgaaatttcacatcagatatctgcacgagggcaacgaaacggcgtgcgatgtgtgtcagcaggtctatccgaataaacgagccatggatgcgcacaaggtgagagtgcactcgaaaacggcgcacgaatgcgacatctgcggcaaaaagttcacccggaagctggcgctgaaggagcactactccatccataccggggaaaagctgtatcggtgcgatctgtgcggaatatcgatcagcaacagctcgtttctgtacaagcacaagaagctgaaacacccggacgagtatttggcggagaagcaaaaggcatacgccagtcggtcgcatcaggtggatgatcaagatcagaagggtgacgttgaaatgggcgattag

SEQ ID NO: 1655 - DNA, 1784 bp, Aedes aegypti
caatcatgaagatggctgacggttctacgatccttcgaagaaacagacccggaaccaaagctaaggacttctcaaactggcccgatgaaccgttcgaagagatggacagcactcttgcagtgcagcagtacattcagcagatgatcaagaaggatccatccaatgtggagcaaatcttgacgatgcccgacgggcaagacgagggcgtatggaagtatgaacatctcagacaattctgcatggaattgaacggtttggcggtgcggctacagacgcagtgttttcccgccacctgcaaccagatgacggcgaccgagcagtggatcttcctgtgcgcggcgcacaaaacgccaaaagaatgtccggcgattgactacactcgtcacacgctggatggggccgcttgccttctcaatagcaataaatatttccccagcagggtctcaatcaaggaatcatcagtgtccaagctcggctccgtgtgccggcgtgtttatcgaattttctcgcatgcgtactaccaccatcggcgaatatttaatgagttcgaggaggaaacgtatctgtgtttgcggtttactcacttcgtcacaaagtactctctgatgtcgaaagaaaatctgatcgttccgattccggaaggagaattgacgcccggcgaaagcgaggcttaataaattgaaactttttacccctaaacctctactgctgtaatgccctttctggactattaatggtgatctaggacagagcgttttatttgtgtaaaggattgattttctttatatttttgttccaaatatgcaaaaacaacaaccatgttgaatctaagttaatttgttcattgtccttcgaaatgcttaataaaagcttatatttgaactttcatttctgtgttgtaacatttgaacgtgtcagcaccaagattttcctatttcgatacatcttatacaggacaacagagcatgacatggaagtttataatcaaaggaaaacatatttatactatttcaattatttaataaccagggggaaacacaagttaatgagaatatgaatatattggatcagcgtcattcgaaatctgtataatctactcgacaaaaaaaacgtgtaaaattaaaagtatttaacgattgaacagtagtgtaatttatataaaaagtatgtagactacaaatataaaaaaataaaacaaacaataactatctcttaagacgtcgcaccgatcttcaaaaggctgaaggaaatattgaaatgtaaaccagaaaacaatgcgctagaccgtgaacaacaaccatccgtcttcggggtcttgtgtatttcatctatctaatgcatgcgcaccctgtttgttacatctacctattttctaaaacacccagttaatgaatgttgtggggcgaaaaaatgtatgatttctttgaaaaagaaaaaaatgagggaagaactaagccgcagtgttaaaacaataagttcgtaggaattttggtagaagcaaaacaatgtacgtgtcagttttttaagctaattgaagttataaaaaatccaaaaaagggaagcattaatacacgacaatttataagattcgcaacagaaaagagaatacacagtgtttagtaactattatcagctaactatatcagtagcgattgaaagaagacaaatgttgaaggaaatcaccggaggtaaaagatgtttacacctgaaaggagagattatgtaattaagccttggaaaggaaagtcaaataaaatcattagtaatatgatcatttaatcgtt

SEQ ID NO: 1656 - DNA, 783 bp, Aedes aegypti
ctgccgcacatcaccgttccactgccaagccgtaacgagcgctgccagttcacgttacggcccgttacgcacagcgtcggggacttcctggagatgctcaaggtcgaggaccgcggcgtggaccgggcggccgtgctgaaccgggacggagtccggatagcgtccgcctgctcggtcgaaaccctgatggacgacgagttttgggtgcacctcaacgacacaatccacgtgagaccaccgaaacgggatagaattacctctgaagaactcacccggctgggcgacgtgcaagcactggtggcgcagctctacgaagcgctcaacgttagcgaacaccaaattaggaaagaacgggaactgaacagcaaactggaggaactgaacgagaagctaggaccactggaagtgaaaaagaccgaactggaccagaaggcggcccgtcgcaccagcatgctgacctgggtcgggctggggctgatgtcggtgcagtttggggtgctggcgcggttaacctggtgggagtactcctgggacattatggaaccggtgacgtacttcgttacctatggaacggcgatggctgcgtacgcttacttcgtgctgaccaagcaggaatacatcctcccggacgtcaaggaccggcagcacctgatcacgctgcacaagtcggccaagaaggccggcgtcaacctggccgaatacaacgacatcaaacggaagatcgccgaaatcgagcacgacctgcgccgactgcgggatccgctctacatgcatctgcccgcg

SEQ ID NO: 1657 - DNA, 1072 bp, Aedes aegypti
atgcccgaaaattactatacctgtttgttgcttgattactttgattcaatcgcgcgccaagattataataacggggctgttcgtagttgattgtttgaatcttgaatcgtttgataaaataatttgtatgagtattgtagatattttattaataatcgtaaaattaaaccatgccgtcaacacaagatttgtgcgaaaagttctacggaacgcgtgatatctacgaaatcttcgaagtcaccaagaatgttcaggaaagcgaaattaaaaaggcttattataaactatctctaaaagtacacccggaccgtgtcaagcaggacgaaaaaacggaagccaccgagaaattcaaagttttgagcaagatctactccattctttccgatcgggaaaaacgtgctttgtatgacgagcagggcataatcgaagatgaggacgattcctccgggaccaagtggatggccatgtggcaaaagttcttcaaacccatttccaccgacgacatcgatgacttcgagaaggtatatgtcggttcggatctggagcggaacgatataaaggaggcttatctgaagggcaagggatgcatagattatatgtcccaatgtgttccctatatgggcaccaaagatgagccaaggatagccgagatagtgcagtcgatgattgcttcgggcgaagttcccgagtatgaggcgtttactgatgaaccccaggagaagcgtgctcgtcgccacaagaaggcggcaagggaggccaaggaggcagaagcgctgaagaagaagctgggcaaaaagaaggctgccaatcaagtgtcccttgagcagcaaattgccgaacgtcggacggaacgcgaacaaggtttcaattccctgctggaccggttggcagcgaaatatggtcaagaggatgaagatgactgaaggatctgtctagctaagcgattaaaaccgagactgagaagaaacggaggatcaatgttccttaattttatgttttacgtgcgttactattgttttaaatactcgattatctgtaatacatgcacccatggtagaataattatgcttat

SEQ ID NO: 1658 - DNA, 2259 bp, Aedes aegypti
tgcaatttaaaatgaatgtcattgcaaataaataaagatagcttggcatgtcccaaaaaatagctgtattccatctgacttgacccatttactcaccggaataactccagtatactgacaaaaaatattcaaatccgttaattaaaaaaacagcccttaaacctggtgaaaattaacacaattaccttttcgatgcaatgtcgacattcaagatagagtcatagaattgggtttccttatccaatgcagctggatggtgctaataatgtttcttctttttaggatctgaagcatctcgtaccgagtgccatctgtggtccatgtctggaggagttggaccggtttctggcctatcggaagcggttgaactacgttctgaagttagcgttcggtttggcgctcgtcaagcgaggggacacttccacgctggacgaactgttcaaagagaaggagtatctctcggcgttgttgaaggatttgaacgtgctggatgtggatgtggaagtagacctcggtgatttgttggacgaatttccgcagtacgatgtgggcagtatgccggatgttaagaacgagaaccgggacgatgaggacagcacccatgaagttatggagaacgcgttgatcaaagttgaggtcgacgacagcggaatgatcgtggaatatcttgaaagcgctgtgaaacgaaggcggggacgtccaaaggtcattaaaaaagaggacacgccgaagaaaaaacccggtcgaccgaagaaaaccatcgaagagtcagacgaggacaacaggccattgaaacggttgaagacggatgaaccttctgaagctgttgaggaagaagagatggagatggtcctagacgaggacgacatgatcgaggagcggctgtccaatgcttccgaacactacgccgatcgggatctgtccgagattctggacaatacgacggacagccaccagcaggacgaggattcggagggtgatttccagctggatgaatcgttgttggcgcgaagcggaaagcggaaaagcaagcagggcaaacggtcgccggtcaagtcggagaggaggagcgagctgatgcattgtgataagtgcaagttcaagacgtactatccgcatacgttcgatctgcacatggataagcattacaagagggaaatgtacccaacgttacaacgctgtaaacggtgcgatttgcatttcgagtcgaaaaaggagctggataagcacaaacgactcgagcacagggatttcatgtgcgacacctgtggcctatcgttcgagcagaagttcgctctggagacgcaccgaaagcgacacgagagcgtgcggcagttcaaatgcgagtactgcccaatggaatattacacgcgaccggagatgcttttgcatgtcaaacaggcgcacctgaacgcattcgaggtcaagtgtcccgactgtggactcagcttcaaaaccaagtctacgctgaatcaacatataaagacccatacgaaccagcggacgcacacctgcagcgtttgcgggtatgggtttaagtcctatacccatctgaacaggcacatcaaatcggtccaccaggacgtgcggttcaagtgcgaccactgcgagatatcgtacggtcggaaggacaaactgcggatgcacatggagaagactcataatatccaaacatacttcgtctgtgatgtttgccttcaatcgtacaactgcaaggaaaagctagacgaccacaagacgcaccacgagcatccgaaaccgctgcagtgtggagtgtgtctggccgctcatgtgacgcccgaagagtaccagcaacatctctgcatcagctacagagacaactacatctgctgcaaccgggacttcaagtaccacttttactacaacaagcacatgttcttggcgcacggactgaagaccaacgttcgggtgaaacctgaacaaggccttctgctgggacaaatccgcgctctaaggaaacaagcggaacgatgtcctcggtgtgagcaggaattcgccacccggaacctcaagaagcagcacatgctttcgtgccggggaccgaacacgatcaccgcgaccggaagtactggggacggcggggtcgcagaaacttccgatacggcgccgagcgttgaaggagttggaagtgcgtccgtggtatctgtcccgccgattgaaaccacctacgagatcgagtacatcgacaactacgatccggacgaggacgcggatatgcaaaagttggaagtggtgtag

SEQ ID NO: 1659 - DNA, 1439 bp, Aedes aegypti
aggaaggccctcattcgacaataccggaggatgaattctttgatgcagtggaaacaggcctagacaagattgaagaagaccggcagctacgcgttcgtctgaaattccaatctcaacattcacaaatcagcacgaccagttctgttcttatcaaccaagagactgacgatggaaaccaacaatcggaagacttcgggaccggtgtgcaagctcgcacgcacaagctgtggccagaaatcgacaaaatctgcacggagcagctgtaccaggcccggcaaggcgtgggcgacagtggcaacggatggcaactgtttgccgatgaaggtgaaatgaaaatgtaccgacgggaagaggaagtcgatggaatggtgattgatccgctaaaatcctgtcacgtggtgaagggtgttacagcgcgagaaatgtgccattacttcttcgatcccgcctaccggaatgactgggaaacaacactggaagatgtacagatagtggataatgtagcaccggatacattagtcttcctgcaaacctacaagcgcatctggccggccagtcaacgcgatgctctgttttggtcacacatgcgaaaaatcactgacaatttggaccagggtgcacacgacgtctgggttgtgtgcaatcattctaatcaaaatgcagagtatccgcccgcaaaccaaggcaaatgcgttcgcatttatctgacagtgatattagtttgtcaaacatatctgactcctggaaaggatagcaaaactgcaactcgagatgatctaacgtgcaaaataacctactgctctactgttaacccaggaggatgggctccagcaaccgtgcttcgtgctatctataagaaagagtatccaaagttccttaaacgcttcacaggatatgttttagaccaatgtaagaataagccgatcatgtactagtgctcgcaaagtatgcgtatggatgcggaatcgaatgtgtgcctgaaaaaaaactgattcaacccagcgacgatgggccagcagtctgagtcttcatcaaacgagctcgttggagatgtcagctgatctatagattaaatagatacgaagtagtgtttatgaaaataccggcggtgattgttaacactcgtcgttttgttttgaaaaattctgattttgttgtttgatattgggtagaaaatactgacgtaaatctggaatctattctttattattgaatcatgtcattgtgttttacttctactgaagatgcccttcataagtgacttgctagattttgatacatctatttaaatacattctagaaagagaacattgtaggggtccagatagccgcaatggtaaatgcgtatctatttagcaagacccagctgagggctgtaggttcgaatcctttcggtcgaagatcttttaataaaataaaattcctcgacttcccagcgc

SEQ ID NO: 1660 - DNA, 1299 bp, Aedes aegypti
atgtccaacaaactaaagaaattcatcgccaagcagaagctgaagtttggtgccgctggttccggacgaaagttaaactccgaagtcccgcagccctgcagctcatcgcaaaaagctcattcatcttttagcagagatgtttatgtaccaccaaagcggaaggagctttcagccgaagcaaaggcagctgctgaagctgcattagcacgtgttcaaagcacggataaaaaggagttcaacacttctctggcagcaatcaaggctcaagttcgtcgtgagttggaaatggaacgcaaagcaaaagaatcaacccttcaagaaggttccagtggagataacaatgctgacaatgaaaggaaagacctcgctgtccaaggcgttttcttccgatgtccactaatcagcgaagaaattctgcctcgtaaagagtggaaagttaagatcaaagagttcttatacgaacaaatgcaacacgagagaggcctgtcggcatgtttgatagtatacaattgtaatcctaaagaaaaatacgaaccatgtgtcgaaactcttatcaaatgcttagaaaacatacagaacaaccccaatgaagagaagtataagaaaataaggatgaccaatagaatgttctgcgacaagattaaggtttgtgaaggagcattggaacttttgcatgctgctggctttgaggaaatcacaatagacgatgaaccttatttgatttggtcagaagaaaatatggaatccgaaactacccttcagagcctcatagaagcactgaaatgttccgaacccatccatttggagttggatcgtaacattcaggtgcttctaccgtcccaggttcgcagaaccaatcttccggatgatttctaccgtatatcccctgaagaaatcaaacgcgagcaactacgacgcacgcaggcattggaggatgcccaaattcttaaaaccaaagcaatgcgagaaaaggaagaactgcgcaccctcaaccgttacaagtttacgctgataagagttcgctttcctaacggggtttttctgcaaggaaccttcaacgtgtacgaaaagctgtcccaagtgtatgaatttgtacagtcctgcctaatgcatgaagcgtcggaatttgtcctgatctcatctaccgaacagcgattcacggaagccgactttgacaaatcgctgtacgacctaaaattggttcccacgattttgtttaactttagctacgaaaacgagtcccagcaactgagtgattacctgaaggaggaacttatgctgcttattcaatctatctag

SEQ ID NO: 1661 - DNA, 396 bp, Aedes aegypti
atgagcttcaatgtgctatcgctatttaacataacgtctctgctatcggaatattttaaactgttcgaaatcgcgtttccctcatcggctggaagtcccgaaagcggagaagaagcaaagtctcctgttgaggacggcgcagaaactcttgacacggattattactcatcccaacagcagttcgatttcagcatccttgccaacatctggtgcacgataaaggaaaccgttcgcctgtggctggaggccgtcggaagtccgctggaattcaccgagttccagttgcacatcggcaagacctttctgattatcctttgcgtgaatttgctgctgattggattctattggagaaagtacggaagaattatcaccgatcgcttcattcgtccgacttaa

SEQ ID NO: 1662 - DNA, 2958 bp, Aedes aegypti
atggtctttgattttccgcatttagccttaaaactgcttctggacttaggaaccaagactacgttattggagcagaattacttaaccgaccaagtgccacctcgattgatagtgataaattctcctgcccagaaccgcacccgtttgtcgattgcagccatcatcgatttcgaaattcagtgtccaattgtgaacccggaaataatcgtgaagatcaagccggaagcatatgcccaaatacagtgttacgaccggcacaatcttagtgttttgccgagtctgaagtcagggaatacaacgcaagtcaaagtgattcattgtccactgcctgaggataaatcgattctgcaactggttagtttcctgggagtgaaaaatgtgaaggacttttggtatcaaaactacggaaaaagtgttgaagtacaactgaatagagcgcactttgccggaatgcagggccttgaaaagctgtttctcagtgccggtatagactacatccagcaggacctgtttgctgatttgcgaaatttgaagtggttagtgttacaaggaaataatcttacacgattgggaaatgtgtttgacagcttgatcgacttggttattctggaacttggagcgaatcagataagtgatttacaggcaggtttcctgcagaagcaatccaagcttcgacatttgaatctgtggcacaatgaaattcgaaaagtttcaaaagatatgtttcgtggagcagagtcactcgaagagctagatttgtccgtcaacttaatcaagtatctagaaccagatgtttttgatgagctgcctctgctatctacactgaacttaggtttcaatcaacttcagaatattccgaagggtttactttcttctaatcacctcatgaaggaattcaggatgataaataatcaagggcaaatggatgttcttccggatgagctgtttgggaatctaccaaacttgatcaccctgatactcagccgcaacaagttctctgaaatcccatcctcgttattcatcggatcttcagctattcaacacatcgactttagctacaacaacctacggcatcttcctgaacaattgctacgtgatcaacattggctacagcacctcaatgtagctaacaacaggctagaagttatacccgatgaactattggagaacacatctgaacttacattccttgatttttcgttcaatcggctgcagaacatctcagccaaagcttttgcatcgctggataaactcattgagctccatcttgagaacaacggaattcttgaaattgatttgtttgccttttctgctgccggaaatttacaaagtctttttctacaaaataatcatctacagtatgaagacagcacagacaaatctccattccaatatctgaacaacttacgtgttctaaatctcaagaacaacagcatcagtgccatcctgcacgactggaactacaacgctcttcagctccatgaactggatctaagcaacaacaaattcacccggttgacctatctcaatctacacttcatatcccgggacatccggattgacctcacgcacaacggaatctcccgggtcgacatgagcggctttcgtattccatcagcttccaaacagcctcgcaaaacgggaaaaatctgggtcaacctcaacgcaaacccgctggattgtagctgcagtgctttatcattcgtccagtacatccaggaccccagctcttccattcgacgaattcagttttccacaagagaactacactgccttacaccggagaatctcaacggaacgaaagtgtccatagttccacttgcggatctcacatgtcagttagatcaaccgaggtgtcccaaggagtgccactgtttccaacgaccgatcgacctcacggttgttgtcaactgtaccagtcgaggtctcatcaggattccacaattaccgtatccggaaaccttcggatacagttccatcgagctgcacatcgataacaactcaatcaacgaacttcctaccgaaggtttgtctgcagtatccatgctattcgctcggaacaacttcatttcgcaactgcataacctcccgagcaatcttcgtgttctagacgtatctcagaaccgcctaacgacactagacgccatcaccattcaagctctcaacggcagccttccgctggaacgactactccttggttcgaacccgtggcagtgtgactgcagctcagcgcccttcctagacttcgtccaacagacctaccaactgatcgccgacacaatccacatcacatgcccaaacggccagcggctcgttgccatctccgtcgtggaactgtgcaaggaacgctggatcatggtcgtcgccgtctcactcagcattttagtcctaggcctcttcgtcggaatttcgaccgccgtctgcttcgcttaccacaacgaaatcaaaatctggctgtttaagcgaaatcttctcatgtgctgggtcaccgagcaggaagtggacaaggacaagcaattcgacgcgttcatatcgtattcgcatcacgacgaagacttcgtagcgaatcacctggtgccgacgctggagcaaccaccgatgaacttccgaacgtgttggcacgtgcgcgattggacacccggcgagttgataaccgagcagatgacccgatccataagtgagtcgcggcggacaatcgtggttctgtccaaaggatttctggaatcggtgtgggcccgaatggagttccggacggcgcacttgaactcaatcgccgagagacgatcccgggtaattgtcatactgtacgaacactttggagacattgaacagctggatgcagacttgaaggcatacttgaggaccaatacgtacattagatggggtgatccatggttttgggatcggctgcagtacgcaatgcctcatgctccgaggatcagaggcgtgaaggagctg

SEQ ID NO: 1663 - DNA, 1907 bp, Aedes aegypti
taacataatccaaaacttaatctcttataggttttgatcgtcagtttctctagaatggtcccgttgtgcgccgcttgcaatgaatctcgttttcagcacgtgtccggcttagaacaaacgattctgataccagctacaatcaattcacagcgcaacgcagtcaagctttggacgcgaatcgaaacagatggccctccccaaagaacgcagcatggcttttcgagagcagtacttccaacacgtggacggagcctacgaagccgccagtgttcgacgcaaacgtcccgacaaacctcttagccttgataggctggagaagaacgttcgatttgtgttggtggaagtggtccctaaagtggccaaagtgttgcttttgttagttcctgtgctggtgcgcgattttgtgcagtttttattgccggcgaaaaagaaatccataagcaatcagctggcactggttaccggcggtggcaacggtttgggccgagcactttgtttccgattggcgcaggaaggctgctcggtggccgttgctgacattgacctcgtcggtgcgcgtcggacggccgaagaagtgcgaacccggtacggagtgaaggccgttgcgtttcacgttgatgtgagtgactacggttcggttacgaagctgaaagaggccatcgaatcttcgctgggcaatgttgatattttggttaacaatgctgcactgttggctatgctttcgttgtccgaaggaaagccggaagacgttcagcggatagtgaatgtcaatttgctgtcgcatttttggactatcagagcatttaaagatggcatggttgagcgacgccgtggacacattgtggccatctgttctttgttaggtatcattccttttggtcggaccatcagctactgcgccaccaagtttggagtacgaggtctcatggaatcgctggagaacgaattctaccaggatggcctaaaaaacgacatacatacgacatgcgtctttccggcaggaattcgcacccggaagggatttgttgatctggtcaaagatatcaaattgacggtaccactcagctctcccgaatacgttgccaacttaatcgtcgatgcagtgagggccaacaaaactgaaatcgtacctagtacatgggaaatgaggcttgtagctgctatatacccgtacatgccaaaatcgttgattttactcgtagttgacacagtgttgggagtaacgccagttctcaccagtagggaataaccagctagatgttgatattatactattatcgtaaagctagttctgatcggtgataaactgtttgatttagcctagccggacatgcgtgtggataaatagatagtttttcggagcatgcatgatgtgatcagcagagtctaacggcgtgacgcagcggcatcacgtgcaagtggccgctctacacactaaaattgcagcccatttaatgacatgttgcagcgaaagtcgatctaattgaaatggtgcatgcaagcatgggaataaacaacagtcatcttgcaacgaggccttatttatgacttcaaaattctagttacaactcaagctgacaaaaataatacacgtttggaacacgagattcacttgaaagcttagttgcagtagctcataggagaacattaatttgcaattgattcatgtttattttattagttagagagaagcaagaaacattgccaaaataaagaagaaacaaatttatcctagcttcctgcacccctgtatgacagctaacgtcgttctcctagaatgtaaggagtaatattcactatagaatgattaaaaccatttgaggaagtaaggagcaaaggggtggaagtgacaaaaaactacttttgagaaaaacgagtttgaaatacagtcaaccctccatgagtcg

SEQ ID NO: 1664 - DNA, 1465 bp, Aedes aegypti
cgtaatcagtttttttgctgctggttggtggtggacattcttgcagtgcaagtgcagcggtcagcagcaatcaggagcggaatcaaattcgtcacattaatcgcccacgcaccgacaaatcaaaagctcagcttccgctccactttccgatcaaaacttcaactggaaatgattcaaatttagtcgacttacgggaaaaaatagcgaaggataaactggtttgtgtgtgacctcatttgactcgcaatgaagatggctccaaaaaccaccagcaacaatctgaagtacctcagcttggtgacgctgacgctgcagaatgccatactgggccttagcatgcgctatgcgcgaacccggccgggcgcaatgttcctcagttccacggcggtcgtgatggccgaagtagtcaaactgctcaccagtctggtgctggtgttcatggaggagggcaaaagcgtccggcggctgcaatccgccttgcacagcaccatcgtgaagcaaccgctcgatacgctcaaaatttgcgtgccctcgtttctgtacatcctgcagaacaacctgctgtacgtttcggcgtcgcatctggacgcggccacctaccaggtgacctatcagctgaaaatcctgacgacggccgtttttgcggtgatcattctgaggaagaaactatttccgacgcaatgggccgccctggtggcgctggtcgtgggagtggccaccgtgcagctggcgcaaaccgattcgagtgggacggcggcctcccggcagcagcatatgccaggtgaaccggatcaaaaccgcctgctcggcttcagtgccgccctcggtgcgtgcttcctgtccggctttgcgggaatctacttcgaaaagatgctcaagggagcggacatctccatctggatgcgaaacatccagctcagcttgctcagtctgcccttcggactgatcacctgcttcgtgaacgacggctcgaaaatcacctccgatgggttcttctttggttacgatggcttcatttggtacttgattctgctgcaggccggaggtggcctcattgtggccgttgtggtcaagtacgcggacaatatcctcaaaggttttgccacgtcgcttgccattatcatttcctgtgtggcgtcgatgtatctgttcgatttcaacctgacgatgcagtttaccttcggggccgccttggtaattgcttcgattttcctctacgggtacgacccgaatgcggccgccaagcagaagatcatcaaactcaacccggacagccaggagcgactcctggcggaaaaggtctgatcgcacgacgtagtattagagtgggctaagctaaacattattttaggattattatgtgacgaaagaaatgcaatgaaaaatttaagatacttaaatttttagatcaaagtttacagttcaaaaataaatgcaattttaacgaagcggtcattgaaccacc

SEQ ID NO: 1665 - DNA, 1179 bp, Aedes aegypti
atgtcgaaaaatcgtgcacaatacgatccggatgctccggtcggtctgatgccgttgatccaagcgctcatcaagccgccagattccggagaaccgaagccgatttgcaaaaagacaacccattcgtactacaagaagcctggccgtggacacaataacgatacttgtgacgcttgcggcgagggaggagacctgatctgttgcgatcgctgcccttccagttttcatttgggatgccatgatcccccgctggatgaaacagacattcccaacggtctttggatttgccatacttgcaaaatgacagaagcaaatccagctctgaaagcgctgaaaccggatttgaaaccgaccaaacccgaatctcagccggatgaggaacccaaagatgaaccccagtcggacgaggttccgcaaacaaatgaacagaaagtatacctgatggcgaagaacctggaaaaacatgtgactaacatcgacattcgagttcgagcggtgataactccggtggatgtcaacatgcctggctgtagctggttcgagaacccagatctgtcgcgatctatctttatgcgatatcgttctttgtcgattggaagtggccaaggcaatgatgtacagctctcgaactatggcaactgccgtttcgtatccgacaaacatgctactatcttttacgacgaggtcacaaaaatgttcgagctattgaactattctgaattcggaaccgtggtgaacggacagcttttcacgtgtgattttactgatcattcgattgaagtcaaaccggaaccacctgctgacggaggacatcatcataccacgaaaaagacgaagaaagatgatcacgacgacagtaacaaagataagaaattggacaaacaaaaagttcgtcaggatgtgctgtctctcatggacaagtctcgccagtgcaaacgagagaaatacgattttctctcttccacaagcatggcggatattacccaaaccggttgcggctgtgtcggtcctaatccgaaaatttccggctgggaaggaacggctattctctatcaaggtgcggtcgtcaagtttggatgtctatcgtttgttttcacgatcaccaactacgacaacaatacggaagaatttgaagatacggacgagtcatcggacgaggaagaagaagcagaaaagtag

SEQ ID NO: 1666 - DNA, 3916 bp, Aedes aegypti
cgaacacatcaggaaggaggaaggatacttataggaaggaccgcactatcgctgccactgaagaagtgtatgatggtggtggcgtaataccgagcagtaaaaagtgatctggctgaacttgtgccagaagcgattgggattggattttcacatggttatgaagtgcaaaaatggttcacacgcggtagattaggtgtgagaagcgtgttgaatagcagtgaatctacggaaaagaggcgaacacgaaggtgcacatgtgtattgtgatatagaaagagttccttgaactggtcctttgagtgattgaaaaaagttgaagcattagcaataggatttaatggataccgaaggttccttgtggtcaattgattgaaaatatcaaaaatagcctttaaatgagttataggcaccgttccaggagaagtgatatgcagttatcgtgctgaagccgtaatccagtgacctgcaaaattgtcaagttcgtagtgaggtaaaaatgtctaaccatggaagtggtaaggacatcagcaacaaggaagcgcctggtggagcaccaaatggggcagcagctgcagcagggaacccaaatgggatacacgcccaggagcactcgtgtgagatctgcggtatgtcgggcttatcggatgacgctatgcgggagcacacccgtcagtgccatgtggagggaagtgcccaatgtcccttttgtggactcagcggagttccagcggcagagttgttgctgcacgtaaatcaagctcacctcgattacctaacgccggagaatgaactgatgagctttattgacgatcagacaccaagtattgacggtgattctgattccatttctgactgccgtggtttttctccatcgatcacatccgagcttctcacaccggtttcaaataccaacagcaaaccaagcatcagcaatggttcttcaatgaccaattcatccggacagcagctcccgaacggtaccagtagtcatagcaaaatcagttcttcgatgagcacctcggcgacgagcacctgtagtagatccagtatcggtagtcagcagaacggtattagtaacggtagtacgagtgcaagtagcagtagcaataatcacatgtcaggagctagcagtaaggtcaatcaacagcaactgttgaacaatcatcaacatcctgaagtgacgataactagtacaagcaacaaaagctgtgatatgctgaacgacggaaaggaagtggtcatgaatggaggtggtgagggttgtacgagtggtgttgtggccggagcaagtggcacatctaccgtcaatggaacgggtgcgggtgcgggtggacaaggttctccactaagatcgcaactaggactcaagcttaaatcacataaaccaatcgcgactaccactacgaaacctagtccgttgcagtgtctgttatgtccttacacaaccgaaaacccatccgttttagaagagcatataaatcgatcgcactttgacccgctaagtcctagtataaataatggtgccagtggaaactcccacgtggatacgctaagtgcattgcagtgtccaatttgtgcgcgaacattcgaatccggttcggacctggaactgcatgtgaacattgagcatcgtgatattctgagtccggcgaaagctgatcgacaaaacggaggaacgcctgctgccgcggctgtgaatggaagcctcaccggtagcctctgtccggtttgcggaatttcgttcgatcacatgaaaaccgcggacatggaaattcacatcgagaaacatttcagcaaaagcccccagaatctgaacccgaaagaaccggacttggagaagcaagcgcaaaagctacgcgaacagcgagagttcgaaatgctacgtgcgcagtacggtatggatgatcaggggaactttcgagagcaatcggctgctgccatgcagagagcggtttacgctggtgagatgagcgttgcggattactacgaacgccaagtcggattacgcgcggcggagtcccatggggttgatgatggttcttcttgtaccaaatcggtttcacctcgcgtattggcactgtcgtcgtcttcgcctaacgtcctgaaaacgtacgtttgctccagcgtcgatcactatgcgtcgagctacggggacaaaggatggggctgcgggtatcggaatttgcagatgatgctctcgtcgctgttgcagaacaccgcttacaacgaagccttgtattcggcgtggggatcgcacggtccggcgcgcactgccatgcctagcatctcccgattgcagcgcatggttgaagcagcctgggcgcaaggattcgatatccagggttcagaacagctaggctgcaaactgtacaacacccggaaatggatcggtgccacggagatcgttaccgtcctgtcgtggctccggattcgatgcgaactggtggacttccatcggcccacctcgtccgacggacgccatcccgaactgttcaattgggtactgcgttacttcgaggaacccagaatccacacgccgcctttgtacctgcaacatcaaggtcactcgaggactattgttggaattgagcaacgtacctcaggtctttcgttattggtgttagatcccagtcacggtccgcgccaggtggcagcccttgggtcgtcacaggattcacttcggctgattcgaaaaaactccgcagccatgagggctccccagtatcaagtcgtggcagtaaaaggactcatcgaaacggaagagcagtaccaggcgagtaaggttttgcggtcccatagaattccgccagaccgttgacgtgctgtagtcgtttacctgatctatgttcgagttgtgcgctaatttaggaattcaacgattcattttacctagtctagaacaaaaacaataccaacttagctaaccttagattgacgataggagaataatatcttgaaatttagatcaaaacaggagtgaaatacttaccttaaaaacagaaataactataatccaacagcaagcaagcaacaactatcacagaaacatacactcactcggagacacctaactcaattagtctaattctaaaccgatactgcaataaactatgactcactaatagtaatagcttacacacagctgaaatcgaacatttcatcgctttactggtaagtttgtgtattctttatacttcaaatagatcaaattcttagttttaacttgcaaagttccttaattcaagagatttctttcagaatttccactattcgttttcccacaaagtaaattatcctgtattagtcaaatgataagtactgctcaattgacgatagcaaccatcaaacacatttgccttcaagttaagagcattgaaatcttggaagttccatagtagtaaatgtgtttctagatgtaatcagagatcgattcaaattagccgattttaatgttgatcatgccttaggtgtagcctacacaggaattgtgtagtgaatgaaattcactgaattccatgcgttgattttaataacaatggtttgcttcattcagattacatattgttttgatttgtatataggcctatttctgtattaaatggttatatcaatttttaatagcttataatgtcacggaagcatagcttccatttcactggttgtcgtcatggaatggcttataaacgagtacctaccttacaagatctaaagattaaaatatctcgacaatcgattggattgaatgccacttacatgtttataattatcctgcgttcgaaaagataaaccgaaggccgagcatgctaacaaagataaaataatttcaaatgctttaagtttcttatataatttggtctttgcatctaacttgttgagcgtaacctaaaataaaaatagaaatacgtattctatatag

SEQ ID NO: 1667 - DNA, 1894 bp, Aedes aegypti
ttatcgcaaaattctggtggccatcagctagctgttgttgatcatcacggattcctttccgtaatagaaaaattccgtggcgaaatctgccccataactcctgggaaaaaagtgcatcccatcgttcggtgctgtgcataatcgatggccgtacaaaatatcaagtgaggtgcttcgggatcataaaaagtgcaagtggattgcgttggtgcgaatcgaaattgcgacggtaaaggtcgtcgtggaaaaggagaaaagaatgtaattttttttttgttgcttcgatcgtaagtctcttttatcgcatacgcaagcaatcagctcggaatttccacggaccaagtgaaaacatttccagacgataacacactctgtggcgaaagggtgcaactatcaaagtgactcgtattggaagacataggtaacgagcagaatgtctgtcacattcgagcaaattattttggacgccaaaagaatcgcgaataggctaaaggatcgcgaagcgttgggcgattccctgctgttggagtcggaatccgttaacaaacaaatcgaatcgatgcgacagtttcaggacgatatcgacattctgaacaagttggcccgggaccgttccaacaatcagctgatcacaatcatccatcaggagaatccacagatacgggagatccagcaggagaatcgattgctgaaggcggcactggaagatcaccagcatgccctggagcacataatgaccaaatatcgggaacacactcagagcaagatcctcaacaccaaggttaactttgtggaagccttcagcaaacatcagcagttcaacgagcagaaagatgaagtcattcgacagcagacgcagaagattcaggaaatggccgccgtcatgcagagggcctcccaactggacgaggaaaagttcaaccaggagcaggagtttcttagcaagttgataacggaaaataagggccttcgtgaactgctggagatttcccacaagtacggttccaacgggcagagaattttagtcgacgacaaatccacccaaaccgacacctacctgctggatgcgttgacggcaaccacatccagcagcggaactagcttcaccgagtcagcagtttcgaacaccggtaccatcaaggtcagcccatcgtccctgaagtcccagatcgcagtcccatcgtcgtcttctacgtcacctcccacgacagcggcaccggcgtcaagtggcgccagttcctcggtggccactctatcgtgacgagattccgacgatagccaagtgtccgtattcttctgctgccaatcggctttactgtaactcttttaaccgagaacccacaaaaacccccgaaaaaatattgtaaaaccgaatcgtgtcgaaaggaaactaaaattacaccattttttattaacagtgtagttattcactcacccatacacttttctcacaccccagcacaaacacatttgtttcaatcataatgttgcgttcatgttttgtagtttagttgcaatttgcaatatttcgtattaatttataacatataatcggcacaacaaagtaaagagaataccctccttgtttgtcgtgtaatgcacacatctctataatgttgttacatttgcataactagttttgatgtaggtaaaaaaccgacagtttcaaacgtattagttcattcaaaatcacatttgctccatttagtactagactcacacatcaaacattagtgtaagaagtgcagtgaacagcaaacaacgttttatcgcgcactgttgcaaatgtagaagaggtcaatgtgatttctcattagttttatacctctcagttttccttatccactttgtactgcaaacgctattgaattaataaatttataggtaattatag

SEQ ID NO: 1668 - DNA, 1066 bp, Aedes aegypti
agcaagtgctcgcgtgcctccctttggcgtgcctgtagagaaaagttttgcctggatcttgtgtccgaagtgtcgcacccccaccaatagagcaaaggataagaggatccaggaaaaagctaaattccggtgcaattgagtgcaagtcgtctggcgaaggaaggacactggttagataattagtgttcctcccccccttccacaggaagccgaacgaagaatagcagtcatgaaacacttctggctattgggcctgttggccctggtactcctagtatcgttcacttcggccaacaaaaaagaagaagccttcgaggaaagcggaggcagtgaacaaggcgaagaacatcacgggaagaaaggtgaaaaagaagacaagggcttcaaatcgaaaaacggtgtagaaaagaaggaaaagggtgatcacgccaaggaggaacacgaatctcactacggcgaagagggtggccacaagaaggaaagtcacgacgaaggagacgagtacaagaagcatcacgaagagaagaagggctcgaagcatggaaagcaaggtcacaagaagggacataagaagggctcgaagaccacgggttaccacaagaaatcgcacaaggacgattaccacaaggagcacaaattctacgatgaccaccacaaagagggcaagcacaagaagtacggcgatttcagtgaacatcactcgaagaaggccgacgaacacaagaagggaggacatcacgagtcggctcacaaggaggatgagtactcgaagaagggccactcggacaagggccaccacgatgaggaccataagggctggaagaagaagcacggccacgaatcgcactactcccataaggatgattatggcaagaagggcggcaagagcggtggcagtgaacatggattcaagaagggtggccactagaggaaggggccgagagctttggctgttttgtgatttgtatctaatgaaagtttttgatttgtatttaggtagtttttgtcaatcaattagttttttatacgatttttatcaaatgtaatcgtaatatatacatatttt

SEQ ID NO: 1669 - DNA, 2332 bp, Aedes aegypti
tgagaattggcccttttgaattgttacgcgagattatttttctaacagttatgctcattatgctgcattgttttgacgttggaaagcgcgcgcttctcgcccttctcatagcgcacagcagcataaaatttgcccaagatcttcgtcttcagtggtgttaatttcgcaccgaagaagatttcgtgttcaaaagttttgtatttttatagtgtttatagtgctagaactccaactcaaaatggatttatcaacgtggactccggagtacttcgccggcaacgagaaacagtgcgtggagcagctggacaaaccggaagtgcgcgcgcagattcctttgctgaactgcacccagcttcacgacatccgggacaatgcgctggttcgcttccggggcatgattcaggacatgcaggacccggaatgttacctggaggagtacgaggtgcgcaacaaacaggacggttcgctgatacgggtccagagcggaaagtatcgcgacgttctggtcatggacaaggatgaggacactgtggatttccaggccgttaccaatcggtacggagagcggaggtccatgtttgtgatttcgattccggggtacaatgggtgggccgtggaatgcgaagagaagatgaatccactgaatctggcgaaaggggacgagaaatcctccgttgggtcgtctctcaaaaggtctcacggcgaggatgaagaaatggaaacggatgatttctgcccagagagggaaaatgtgttcaagaaaccaatgcttccggttgaacccagcgcaaaagacctgcaagcatgttcctcgaaaatggccgctgcagccggaagtaaaccgaaggtactatctgcggaatatctcctcaattctcctattccggagcgccccagcaaagcgtgtctggtcaagctgtattccaactatgacgagtgcactttgaacagcttagtggatgtcgtaggttttctatccgtagatccagctttggatggcagtaccgatcaagtggaagacttcgaggacgaaatgtccgaacaccaagccacgaatccgccgccatctttaatccctcgaatccacgccataagtttccagaagctaagacatgtaaaccctctgctggaaatcccccatgaatctccgggtggcctttgcggcgtaaccgacgtttggagagacatccagaacttactaacccaatgtctgttcgaggacaaggttgcggccgattatctcctgtgccatctgatatcgacggtttacataaggaacgagctggaatcgctgggccacttcagtctcaacttgagtaacattccggcggaagtgcttcccgattacactagggggctgtacgaaatcatggagcttctgctgccggccagtcactacttcccgatgacgctggagaatatgaacaccatgcagtttgtgcccaagaaggattacaccacgaataagctgaccagtggtttacttcagctggcaccgcacacgcaccttctgctcgacgaaaccaaactgcaaaccgggaagctggaaagtagcggagttgaagcggtccaaagcattgcccatcttatcaaaacccaaaaactgaagtataatttccagttctatcagctggaattcaattcggacgtgccagtattagtccttagtgaagggaaaagtatgcttccgaccaacttctacttcccgctggtgccggacgttgacgcagtcaagatgatcggagaaacgctgaaagcgggaaagcacttcatccaacccaagctgaccgaaatgcgtaagtttctcacccgccaacgaattcaggagttcgacatgaaaaacttcgatccggaggtcatccaaaatgacttcatccagatgaggaaggaaagcgacgcaacggccgaggatctgcactcgctgctggtgttggctcgactgttgggactttcccggggcaagaattcgatggatcgagagtgctgggagtacgccaagcagctcgagctggaacggaagaaccgcgtggaaatgttcgccaaacggagaaacgagcagtaggattaacagtgtgtaactgagtctcagcgtgtgactgactgctgcctaaagcgctaaaactgtacctttgattttttccctatttaataaatgttggttttataaaaaatgaaatgttctttctgaatgttagtacatacattcctgggtcatataaaaaaaacattaaaaagtatgttatccatatctctgtgattacattttttattgttgctcttcatggcttattcgaagagcagtgttcttaccatttttttttaattttgctta

SEQ ID NO: 1670 - DNA, 645 bp, Aedes aegypti
atgaagcttcaattaattctattctgcgcatttgttggcgccacacttgccttcgacaaagaggaaaagaaaaaaagcattcccctccatattccgatgccatcgcttgagcacataccagtgccgttcgtgaagctgaacttggtcaagggaggagaggtgatcaagcacgtcccacaggaagtgatcgaggaagttccggtggagcatcattacagcgtcaataaaccagtcgaagtgatcaagcccgttccggtgaccaaggaagtgatcgtcgagcgcccagttgaagtgatcaaggaaatcccgatcgagaaagtgatcatcgataaggttgaagtgccatacgaagtgatcaagcacgtggaaaaggtgaaacacatcccgatcgaaaaacacgtggaagtgatcaaacaggtggaagtgattaaacccgttccctacaagaagtatgtgttcaacaaggtgccctcgacgatcaactaccaaattccggagtacgtgaaagttccgtactctatttccacgaagccggaaggaagcattgctgaagtttacggcaagagtgaaagcaagaaggataagaaaggatggggcattcccagtccgattggttatgtaagaagtttaataagcagtaagtga

SEQ ID NO: 1671 - DNA, 4666 bp, Aedes aegypti
cagtagcagcaacgagtcgcctttacattatccattcattgcattattggttgttacatggtgaaaaataacccactgaacagtgtagtgtaggaccaagtgaagtgagtgtatgcataagagtacgcaggctaaaataaatcacagtgctgactcgatacacagtgttctgttgtgaataatcagttgtcgattcgtatgtatataaagttctgaatacaagaaaagtaggaaaaagcgacccgcaaactctagcggatcgtggaagacatatagacgaagaaaagtgattgtagcagaaaagaaagaagcgaaagaagaaaacacaagagtgagagtgagggaggaagtaacgaaaaaatattagccgctcggaagagcacctatatttatgtattgcagtaaccagagtagtatggctactctgttacagcagaagagttttatgaaaaatttgaccaatggagcaaacaacgtggtggtcgtaaatggcaccaacgagaaccaaacgacgacaatggtggcggccgcggctaccacaatggccaccgttcctggcagtgccagccggatgcttctgccacacgaaacgaccaccctaatccatcagcaaccgttgattcatcagcaaacaaccatcaacaattcgttcacctcgacgcattcgcctgcctctagctcgatcagtttaaactcgagcagcttcaatagccaatttatcagtcatctccagagcaatcatcatctgtcgtcgcagcagttattcggcagcaacagtagtcatcagcatattgtgaccacgactgccacacccaccacttcctttcaaagtcagttcaacaatgcctacgtagacgtcaatgcaatatttcgtccagcagcatcacccaccaccactagcaccgctacaatgcagcaaaccttttcgtcaactcatcatccgctgccacatataacgaataacaatagcagctccttagtgtatataaatgggacccaacacagctcggcgaccgtgctgacaaagtcgttgtcgtcagaacttcattctcatcatcaacagactgtatccgagagccagactgccaataccaccgattccgcacggtccacagcggcttccgacggatacggtgaatgtggaaacgggacagatgaacaacctgccactgccactgatgcgacggatggaggaagcctcgatgcgaaatccggtgccgtcgttcccgccagcgaaaaggaagatgaccaagagcaggaagcggaacctgagatcgacattgtcatcaacaatgtggtctgctcgttcagcgtgcgctgtcatctgaacctccgtgatatcgcactcaaaggtttcaacgtggaattccgtcgcgagaacggaatggtgacgatgaaactgcggcgtccatacacgaccgcgtccatatggtcctcgggcaaaattacctgcactggtgctacatcggaagatcaggcaaaggttgcggcccggcgttactcgcgttgccttcagaaactaggttttaatgttaggtttaggaatttccgaatcgtgaacgtgctggggacgtgcagtatgccgtggggcatcatgatcgtcaacttctccgaaaagtacaagaaggatgccagctacgagccggaactgcacccgggagtcacgtacaagctgtacaacccgaaagcgacgctgaagatcttctccaccggcagcatcacagtgacggccgccagcgttgcattcgtgcaggccgcgatcgagcacatcttcccgctggtgtacgaattccgaaagaagcgtaccccgcaggagaagatagagatgctgaaacagcccgtgttcgatccggaactgttgatcgaggaagaatgtgatatcgagtcgactaccgtttatcccgctggagagcagcgagatggcggcgacgacgacgatgtggacgcgtacgatgacgacgaggacgtgcccatcaaccctaatgacaccaaagcaattaaccacctgcgaaggaatagtcgtcgactgtgcaagtcccgctatagcagcttacgaaacggtggtcggcgacgtccatccggcaaggcagataacgaccccaccgaggacgcgatgatcgtgtcggatgacgacgacgatgtcgaggagatcgagagtgacgatgagtagagagatcatgcataatgcatatagtagattcctattttcctctggctttactcaacttgtttcttacccatgttcaggaaccttcctgggcatttagcgaaacctagtaatattcgttttctttattacgtttcatccatattttttctattgttttctaatagaaaaattgtggtttcatgtgaggaacactggtcatagacaacacaaacacatacatacacacaacattgagcaatggagcaagcctgtcctagaagcacatttaccttaaaaacctacaaccaatcctgtgaataattacgattatgtataaaacaaatagccagcatggaatcgaaattattcagtttcgtgaatgtgttgcgccaaaatagggtagccttattttaaagtaatgttacgcgtaagtaaggtgttgccacacgatactcggagtcagtagcgcactgttcaaacagttatcatcatactctcattcgacaccgtctggtcagtgcgagtcaattgccgcagcacgcgaaatgcgttgcgtgtgtgcttgcaattaggatgttcgtgattctggaagagacattaccagaagatgatttaagaaaaaagaaataagagagatcctcgttcgccaatgcgttgagatatttacggttttttgttgcttgtacattacaccgaaagctgctgtatcgattctgttttatccattgtgacactgtcgttcagttgagtctcaagaaatgaatcgtacgaaataaaagggttcctgcaaaatgtaacgtgcacgaaatatggtgttgtttcaccaaacgagctgcgttcctataaacatcagaaacaaacactgaagaatcaccgatcggagaacgtgacgacaaacgcacgggcattaatcacatcaaactactactaaaattaccactatcatattatactagggatattggtatatagcgttggacggaaggtggtcccatatatcatgttcccattcagaccaaaaacaaaatgagagagagcagtaaacgattgatatttccagcgccaccgacgtttttttatttcgaatcaaatcttgtagatatttgtatttattttagatcaagttataaaacaaacatcgagcgcacgagcgttgtgctgttggaatcattgtgtcgtccccttcgcttcactcttatttgtcagaattttgatctacgtttcaattacgttgttttgttaatctatcctgttttcttttaggtctttaattttcttctacaatttttatgcgaaatccaaattagaagtagtggtgaaagagaatattatgttgcaatcgtgatgagcaccacgtcaaaacagaaagctagcgctaaatcaagtaatgtgtaggttgtagaaataagcgcgactacaaaagaaacttaaaacttatgtttttttttattgttttgtttgaaattgctttccagtggtacacgttgttatacaatgatgtacgagaaatttttgtttagttttcagaatgattaaagaaaatctatcgaatagtatcatgttataattgtaattatcaaacgggagagctgcatgcggagcgtaatgtgcttttggctgccctgggcgagaaaatattatctgtttttaattttatgggtcgtcattttccaaaagtggtaatattggtaggtaagacaagtcttaaataaagaatgctagcgatattgaaagcatcgactaaaactaaaacatggatgttatttggaacaaataaaaattgtttcgaggttataagttggtatatgagcttatactacgaggagatctgatctacacggttagtaacgtcattctactcgagagtgattcttctcaacattcgagttctcacagagtgagaacagtgaggatagaaatcttgtgagtttagtgaggtgtcgaattatcccatttggtatgtaagagcgagatgtcactttactcgtataataagtatattggtctagataataattatctcaataattattaattcaatatcctcacttcgtttttgtctccctcataatttctgtcgtgttgaataataatttgtcttattttacgagaagagtgaagtgaaaaatgatggtcacgacgtacggaaactaatcatggaattaagtgattcgctgtgtaaaacaatctgacgctcaactcattcgaatcgaggtttgtcacttgataggtgagaatgagatcatcatggatcgcatcaccaaccattggtgactccaagatctttacattatcccactaacccaatatccatgacaactgtggagatgcaaaggtatactcggcctctagtaacaacggttgtctaactaacattccttgccttccccgatgatcgtaaggacgtggccggcgccgttttttgacttttaaaatttgagctctcgatttgtgcacattgaagaattgtaagctaatcccaagcccaattcattgatttcctgtgcgacttcgatt

SEQ ID NO: 1672 - DNA, 2208 bp, Aedes aegypti
aatttaatttatttccttcaggttttttatatcagtttttaattaggttctggttgtttgtttcatctcttattctccatatttctgtccattaaacgattaggttctactctgtcggttttagacacacactctctcgctcgtcctcgttggtagcgacactttttcgcttcttcgtcttctactccgaaacgctaccaaccttctttgccatcattttccaaccatttccgacactcgtgacacaccaccgatctcaaatctcaaaaaccctctatctctgtacattcgcttttccgttttttttttggattttgcctaccgaatccagcttccctatttggtggttaattactgtttcgcgcgcttctctacattgggtgtaacgtgtgtgtttgttatcgcaatgtctaacgtgactttttgtttcctctccacatttctgtttgatttcgctactcgcgtctgttttgtattgttccacactcctgaccctggttactttccatacggtttttttatttcttgttccgattctcatctctactttgtatgcttcgtttgctcttgtttctttagtacgaaaatatatacgtttaataatccatttttgtgtgtgtttgtgtaattgtttttttttgtttaatttctgtttcatttgctaagtaaatatgatccttttatagtttttttttcatttgctcttaaataggattttttcttattagtttgcttctctttcatgccatttaaagatgttttatactttttgttttgcgtagttgtgagttatgcaaaaagtgtacacaagtttgcatatccgttaaatagtcaatgatgttcgattttaagagtagtgagttgttcttacggaatcgtaatgaaaagtattttttgttctcttatcaagttgtagtttaacacattagttatcgttttcgcagtgtgatgttattacttgttgttgctatttggatatcgtttgggtacacggttttttctttgttgttttcaaaagtttacgggagagcggagtggcgtgcaggcgcgtgaaactgttgttttgcagggatgtttgcattgatttttgttaatccctcgattacaatactctttttgtagcacataaagcatgctgatttttcagttttcgttaaactatttcgacactttaaacattattttttttcagttgtttaattattatgcttcaactaacaatcacgtggttctgtttagttacgatttaatgtttactacaatgtttttttttattttccagcgcctactgcgtaacagcggttatcattatccgttatcgctgcagcctactttaccgactgagtacctgatgtgtgttcttatattttcgattccaacagacaggaggtggattctacagttctaatgaatgtgtgactctgtatacaatgcttgctttgatttacgaaataatatacacattttaacacattgactgagaaagctcattcactgctttacgtttgacttctcgtacaatttaagccgtgatcaatttcaacaatatagcatttgtttggggtggatatggttgaaagttccgtccttacaagaaaatggcaaagtcaacagaatttttttcattttggcatgggacttttctcatcccattgttgactgaaaaagctgccaacattcaggaacaggatcacggcttctcgaaattcgcaccttctattctagcacttcagaatatcatcctttccaacttccgaacctaacattgcttaactcaatactaatcaaagaagattaccattgttttgtatgctttagaatatataaataagaaactgagtctgttaatttaaaatcctatatataaaacatagttttgtggaccgtaccgatagctcctcaaaaaggtaggattctaacattcctactctgatagaagccggcacaaacccacgctcgaagcattatttgtcctaaattacagtaaattgttacataggtttacagttacacagagatacataatcgtaattgtttcctttccaaattgtgtttccattcgcttctgtcattcccaagaaaacataaaataatttcgatactttcccactgtaaagtaaacaacttgccctactcttgtcataatttccgactgacactattgtgagaatgtaagaattaaggttacttgcaacttaaaattggcat

SEQ ID NO: 1673 - DNA, 2781 bp, Aedes aegypti
atgccggccgattattcagaaaccactcttattgactttaaaacggacgacgagtacggtcatgcggtgcgatacaaggctcgaatcgtcgccaaggatttcgagcagggaccggaactggactacgatgatcagaatcattctagcgacgtgatagacccgaccccgaccagcgaagactccaagaaaatcagtgcaatcgaccgggataccgtgcacaggatctgctccggtcaggttgtcctgaatttggccacggccgtgaaggagctggtggagaatgccatcgatgccggcgccacggttgtggaggtgaagctcaaggaacaaggtgccgatctggtggaggtgtcggataatggaagtggtgtcgaagagaagaatttcgagggactgaccgccaagtatcacacttcgaagctgaaggaatttgcggatttggcgtgtatcgaaacgttcgggtttcgtggagaagccctcagctcgttgtgtgcgttgtctgatatggttgtagtaacgaggcatgaaacggcaccccacgggaccaagctggaattggaccatcggggagcgatagttaagaggagtccttgtgcgagagccgttggaacgacggtttccttgtcgaacttgtttgcgacacttccggttcggaagaaggagttccataagaacatcaaacgagagttcatcaagatgtgccagatcctgcaggcttactgtctagtgtcggttggagtacggataatctgcagcaaccagaacaagaagggtgttaaaagtgtgatcatgagcacgcagggatcaaattcggttttggacaatataacgacggtatttggatccaagcaatcaacggaactggttcaattgaagccggccataagcagcagtggcaagatcttagatctgaacgagagtgacttcgatgacaccctatctctgactcaggaagaagtcgataagctgaatctgtccagatataccatcgaagggtacatttcaagttgcgcccatggctcgggtcgatcctccaaggaccggcagtttttcttcgtgaattccagaccttgtgaaccaaaggccatcatcaagatggtgaacgaaacctaccacaagtacaacgtgaaccaatgtccattcgtttacctgaatctgaaaatggcgcgctcggatgtggatgttaatctcacaccggacaagcgacagattctggtcaataacgaaaagattcttctgttggcacttaagaagtccctgatgaaaacgtacggcaccattccgtcgacgttcaaaatgcaaaatttggatgttagcgccacgtctcgtttgttgaacatttctgtcatgtcgaaagacggtggggatgaagattcggtagatgatcaaagcatggaagctccaaatcccagacggatgttggccgcatttagccacaggggtgcctcagcaggaaacagcaccagcgacagtacaccggtgaaggctgagaagcgaaagcgtgaaagtgtcgattctacgcctaagatatacaactttataaccgctacgcccaaggctgaatcgaatgacatcaccactggggaggcagctgatgacgaagagctggaagaaacgttgtcgaagattgcacgcaattcgacgatgacagaggaagacgctatgggtggcgatgttctgccaccgatggcagacaacaagcagtacatggtgaaggttctggatccgttggaaattgccgggagttcaactccgaaagcctcacattccctggaacaaaatgtacatgtcatcagatgccgcaacgaggaacctgaagaggcgaaacccaaactgatcttcgaaaccattcaagattttgaacccactccaaagctaacagtcttgagccccaaaaaagagccaatactcgatagtcccatcgtggatcgaaaaccagaagtaatcgaaatcgaccaaccatcgttcaaggaagattccttccggccttccacgaagaagtgtttagatatcgacatatcctcgttgaagactctgatagatgaagaacaaaaactaacgcagtcggatgaagcagttcgcaacacctctctaagtcgactcaagttcaagagcaaaatcaatccgtccaacaaccgcgccgccgaagatgagctccagaccgaaatctccaaggaccgattcgcccagatggaaatcatcggccagttcaatctggggttcatcatcgcacggctcgagcaggatctgttcatcatcgatcagcatgccacggacgagaagtacaactttgaagatctccagcggactacggttctgcagaaccagaaactggtcgttccccagcagctggagctgacggccgtcaacgagatgatcctgatggacaatctggaaatattcgaaatgaatgggttcaagttcgagatcgatgggtcggcggaaccgaccaggaaggtcaaactggtggcgaagcctttcagcaagaattgggagttcggcaaggaggacatcgacgaattgatcttcatgttgcaggacgctccgaattcggtgtgcagaccgtcgagggtgcgagcgatgtttgcctccagggcgtgccggaagtcggtcatgattggcaaggcgctatcgaaggcggagatgcgacggctggttagtcacatgggcgaaattgaacaaccgtggaattgcccacacggtcgaccaaccatgcggcacctagtgaatctctcaatgttacaacaaggagaaataaaaggcccagaagaagacgagtaa

SEQ ID NO: 1674 - DNA, 1208 bp, Aedes aegypti
agcgaacgcattccttgggacaaaaaattcacaatcttagcatcaaacccggtcaatagtcatgttttgctgcctgaagaactgtttgaacggagttcttccaccacagacggtgcaaattcgacgagaacatgatccgatccagcttgatacgtcacatatgggacacgaggtggtggtgataaaaggaggacaacgtgcatgtggatcaggtggtgtcatagcaaacactcctctgttgcagtccaagtcctacttcgaggtaaaactacaacaaggtggccagtggtctgtggggcttgcaacgcaacaggctgacctgaacgaatcaaaaggaggtttcgacaaagaaacgtggtgtctaacttcggaaaatgtcgtctaccacaacgcaaagcctctgcataaactggaaccaaacgtagagcctgatggaacgattgataccgatcccgctgctctttcaaaactggacacaaacgtaacttcggcgcttgtgaacaacagcggaattccccaagaaggggacaccatcggagtcgcttatgatcacgtagaactaaacttttacctaaatgggacaaaccttaacgttccggtgctgaatgttcgtggaacggttttcccctgcctattcgttgacgatggtgcgatcctggatatcgtgttggataactttacttttagtccacctccaggatttgaacgaattctcatcgaacagtcactgctctgatctgtaactatgttaatgtattttatataagcattcgcctctcatatagactcaccttcttggtccaacttaacaataattctattatagatagcgctcttacatcgttttatttgttaaagtatcaacttacccataattgtttctattaacttatccttgcctgacgatccgatttatgagaaatatgtatgactatcaaaaaaataatagtctcatgtattgacttgatagttttgagcgtaaaagaagtcattaaacaatatgtattatagtgaaagaagcatgattttcagaacgtctgtctttctttatgcctatactttgatgaaaattgtcgtacgacataatatgcattcaaagatggagaacggaataagaaaataatatacatttaaacgaagttgtaccgccagcaaaacgatcaggaaatacaagctgtataaataattaaaaatattatgtcaaaggt

SEQ ID NO: 1675 - DNA, 1428 bp, Aedes aegypti
tttaaatttaggatcatggctacacgtggggtttcacccaaaactcgtgcaaatgccacttcaaattcacatgctgcagcatatcggacactgctcatgaaatccctttgtacagtttactccaaggggttaaaattctttgaaacaataatcgcgaacttatcagccgagattaaacacttcaatgctcctatatcgattataagttggacagcagatatagtcataaactatttaagcgaaagccttgagagaagccagtttaaagttgtcagccattcaatctagtgcgtgcaatcgcggaaaaaacgaaaatgaatctaacagtaggactttcccttttgttcagtgtagtttcacttacaagtgcagctagtatacagcggagtgatgaagcagatgttgtcacctcaatactggaaggtttgaatttaaacgacgttcttattgaattgatcgagcaattcaagaacattatgccttgtgggattcctagcttgggagttccagctttggtgccttttgagctaaatcacactgcattcaaaattgataaacctggacttctgtactttgatggagagatcaacgacttatttgttgatgacatgaacaatttcgatgttgtgaacgttgatcttcagatcttcaagctgaaattagacttcagttttcttttccactcaattaaaactactggaaagtataaggcacaaggaaaagccttgagttttattccattcaacaggagcggaaattttggattcaacttcaatggtttgagcctagctggatcaattaaagtggcattgaatggcgataagctgcttgtcgaagagtttaagttgtacccaacagtgaaatctgtgaattccaaattcgaacacgttttcttcctaccactcactaacctgatcttcaataaaatcgttgagtcagttgtgccaaaatacctgagggaaaatcaagaggacgtttcattgttcctggagagttacatcaaaccagaagtcaacgagctattgggagactacactcttgaagatctcatgggtttgctacagggttcagaaaatggaaccattccaagcacttgttaaatgtactcatttggtcgttatctcaaactcatcatcgaatccttccattagttgcaatcaacacccaccataacaagggcaaataaaaatgtttactgaaaagagaaatgatttgctactttcttgaggattatccttggtgtttgaaaacaaagcggttcgcaagatggttcgtcttcatcatctgtcgtttcttttgttgcacatttcaccgaccaattcccggtacatacaatcaatgccctttcgggaaatctatttcatcgcacagcgcagcaaagagcaaagcgctcgactcagaacaattccccgaagcgaagaacaatct

SEQ ID NO: 1676 - DNA, 3049 bp, Aedes aegypti
gcaagcagagcagtaaagtggaaagcaagtgtttacaactagtgcaaatgccgaaagtaccgatatatcatcagtgcgtaatctgttttggggaaaaggtataattgcgataatcaattttgtgcaaaaccatcctaggtgtgttgtgggggtaagaagaaaatagataaaacggattgtggaaaatttttgaaggtcgcatctgtgaccagttgtagctccaaatagcaagcagctaatcgccgcaaatccggcaaaacaatggcccggctaacggaagagatggtcattgccaggtcaaaacagtcagacctggcagcaatcaaaaagctgaactgttggggaagtgagctgagcgacgtttccatcataagacgtatgcgtggtgttgaggtgttggctttcagcgtaaaccgaataagcactttggcagattttgaaaattgcttaaatctacaggaactgtatctcaggaagaacaacattactgacatcgatgagctagtatacctgcagaatctaccgaaacttaaatatctctggctggaagaaaatcctgttgtggaaagtgccgggccagggtaccgacaaatagttctccgagcgttgccaaatctcaaaaagctagataatgtagatgttacacctgaagaagtttcagaagctatgcgaacaccagtagcccaacatcacccaaaacaagaggtatatgaagacccgccacctcctacgtatagtcaacaacagcaacctcaacagcaaccacagcagcaataccgaaatcagagcccagttgtcgaacgaagtcctccgaaccgggatagctactcccctgcaccacatacccagcactcatcacactactccagcaatcaccgcggttcctatcaccaatacgatagatcgcctggctcagaccaagacagtccagtttctggttacagagatcgtgttccgattgctcccagtatgtcaacccattcgatgaaggaatattaccagtcagactaccagcgacaaaatccacccactcattatcgacacagccagttggatctaacggaatgggatgaaagcagtcaaaatgcacatcaaatcaacaacaacaacggtcactcatcaaatcatatcaacaactaccaacagcagcaaagtcaacagcctcaacagtacgcccaatcaaactatccctcgaaccgacgaagcattggtgccaacagcgaaagggatttgtatcaatatcgcaatggcaacgctaaaggatctgagcagcgagatgaatgggaagatgtggagcgtcgaaggaatgaaaataggcggtcggattcaagattcaacgacaatgcaagtgtgatatccaatgctgtcctcaaccattttgctggagttcatcgaaggcctgttaatagaaactctaacttgttgtctgcaaccttgtgtttggttaaggaactggactatcccagtctagaggtagtggaacatgctgtacgatgtcgcatcgatgaactggccgaatagttttatatattaagatagttttaccttgctgaatggcgttctaatcgttctcgtctcgtatgccgtctcgaagatattatgcaaacgttattataatgaattcttaacacgtatctgttcagttatctacttctttgcactgtattacttaagatcctcttattgtttgactgcttcataagctaaaatgaatcgagagtgatccaaacgagatgtaaagctttctaaggcgaacatttgtaacatttttcagacaggaaaagaagaacttacatgatatgtgatttatattaattgagaaaagacttaaccacatgttagcatgaatgatgatgtacatgagaaaaaatagcagaatagtaacaaaacaaaataattgtattcaatagtaaacagcaatgaacaagaacacaataatctgccaactttgtaataaaattcaacaatagatttagctgttccaataataaaactaacttaatgtaatttttctattcggttgaacaaaatgcaagatttacggttaatgtatgatcaatttatgttaatgtatgatcaattttgattcagcgtttttgcgccctattttacattatcacgactgttaagacatattctcaaatgccttcttatttcacaacaagagcaggaaaattttctttgcgtttttgcaatattttgcaagtaaacagtccaatattcagtacaaatagaaaaacagaagtcgtaaaacaacttgaagggatgatttagtttcatgtcttcttctttaaaattggcatagagaggttttagcagtgaaataaggaaaatattttacatttattgtcgaggtcaaaggtgcctagtaatcataaccatgcaatatcgaaggtttgtgttcatgtttgctttgaaaagcctttgaaatgcttttaacgtaatctgttcctcgaaataaaccagtcatttgcagtttcgtccattattcaaatgaaaataatgttaatcctgaatcgggatcaccagaggaatacgggcgttttaaacgttaactaatgtaaagtaagtatgcatagtagatgcgaatacagtgtagcaaaaggatttaataaataactactaacaaacatgttttatcattaaatatcacattcatcacgaaatgcagtatgaaatatatttcaaacaaaattgcatacaagttattctcagccgatgtttcataacacttttagtcaagttttcaacaacacccttcaatccaccagccgttgtctgcgcgttgattcgaataatattttcagccaaagcttttcgattgactggcagtgttaagacggttgagtcgctagtgctttgcggtggctagaagcaactaatatttttcacgttgcgatatgcttggggtcggtaatgatttattactaatgaatgggttagatgcatggcatttttcgctactcataacataataacgcacatgtgctagcgtccatgcgcgaaaattgctaaaaggtaacgtgaaaattatttgtatggcgaaatg

SEQ ID NO: 1677 - DNA, 2124 bp, Aedes aegypti
atgaacgaccacatctcaaacatcgacgattccttcttcgaaagctcatcgtcttcgagctcgcctgtgcggtctttctttgattcttccgatggttcgagttgttcgcgctcgatatcaccctttgctgacgaagtcttccgctcgtctaccccggaaagttcttccgaatctatggatgttaacgatgatgacttcttcgaaacaagttcggaaaaagctctgttttccgagtactcgtccgaagagagcgataacgaagagcacaaagattcaggatttgtgtcagtattgtctcgaatatcgatgccgattgatgctggaaatacattatcaatgcatgatgtttccattgaatcggatttgccacctgacgaagatgttgattattggagtgaactgatgacttgtaacagagtgagacatttgtattcagacaataaattgtccttgaatgcggaagtggaggattgtaatgagaagaagttacataagtctgaaaacaagtttaggcaatacgtggatttgaagaatagtttgaaacaaaacaatagaatcggaattttagaatgcgaggaaattcttgatcatgaaaaaccaactaaagaaacttctagaagaatggaaaatgaaaaatccatcacccttacaaaattttctcctactaatgaattgcaaatcgtgctagaaaacgaagaacagcttacaaatgattgtctgctgaaatgttcagaagcttctgaatgcagtgataccttgactcaaaattccttccgtatcgtcgaaaatacggatcccattacaacaacaaaattggactgctcaaatgaggacactaataaaatccaagagatctgtgcaacgacagaaaacacacaaaaacaatcgcttccatcagaactcaattttggagcatggctcccatcacaatcagatattctcacgtccactagttcaaggtcgacccaaatcgatcaatcccaagaaacgatttgtcgttttccaagcgtcaaaaagaattccatcattccgcagttggaaatgggtgcattttgttcattcgatgacattccggtgcgacagaaagagatcatgtctacgattggagccatttttcaacatctgtcccaatcggagctggagggtagcaaactggttctgttggtcaaaacacgtgccacgtgggacatgtgtgccatggagaatgatattctgacgaggcaatcgactccggaggaatgtttgaaaaccataaattaccaccacaagcatagtaaacctcgatttgtgttgatagtatttctcctgtcggaaatcttcagaatgcttgcaagcgggtccagctgtactaagcgagaactgtactatcgcaatcctcaaataactatcaaccaacgatgcgtcgatgagtgtcttcgagacgtgtgtttcttgttgaaggccgatctctgggagctgaatgtgttctgctcgtccaaaggccttattgctgggccagttaagttccaatccaagctcgaagagacaatcgattgtttcaactccttcggaactcaaattccaacagatgtaaacgggcttttgtcgatcgaactagatgccgatcttgttctgatcgtcgagaaggataccgtatttaggaggctgctggatgatggcattctaacaaggctgtccaaaaagatcatcgtagtcacgagcaagggctacccagatgttgcaacgcgattactgttgaagaagatctgggataagcaccgaattccaatgtatgccctggtagacgcagatccttttgggattgaaatctactgtgtctacaagttcggatcgctggccctctcccatcaatcgtctcatttggccgttccatcgatccagtggttgggactcaggccttcacacacggttctactggatttgaagctgcttccgctgacacctagggacgaaagtcgtatccgagagcttcttcgacggccgtacattggccaacccgggtgcgagctggaacgggagctgaagatgctgcgggaaaacaatggaaaggcggagattgaaagcttggcggatatctcagtggactacttgataagcgagtacctcccgaaccaacttggttaa

SEQ ID NO: 1678 - DNA, 2752 bp, Aedes aegypti
cagctggacgcgattcggcggcagttggaccacctgctggaatgcctaccaggaccgagaactccggagcagttgatcagattcgacgacgatcagcgtacgctggattgggaaaagtacgcttcagaacaatacccggattttctggaagagttgatcgcgagatttgatcgggagttccccggcaaggagccgcacgtggatgcgaggattatgaggatctttggcattgactacaatcacgtattcgtagtggagagtttggcaatgctaactgcagcagataaactcagccaaaacagagaagtattaccatttatattgagtagattagtacaggatggcgagtatttaggcgggtgctttgttgaattgagcttgaagcaaaccgaatctaccgtcacaccatcgaagcaccatcattggcacaaatccgagcaactggttcaaattttggccagcattccaaacaaggtggccaatgtactacaacgggatacaccagatacgttcctaccagaacggtattctcaaattatgctccaacaaatgctcagagcaattaattcactagccaaaatcacccatctacacacccacctcgcttacgacacgacattccttgcaaagctattcagcaaactgattgtagattacaactttgataagcaatcgcgttatttacaattctcgcttcgaatcctaacacattgggcgcggttcaatgattgccaacagagaccacttatcgcagcgatttgcaccggcttatcgcgtcctgcagtggaagtactcgctcaaattgctttacgcgaaggaattgatttgtgcaatcttttcggaagcaacgattgcactggggattggaactatgtcctcacgaagaagattccactgttttgcagcttctcacaggatgcaattgttgagaatctgatatatttattggcgaggatgttcgaagcggaattgaaggcattatccttagaattagtgacggtatggtccagtcgcacaggcatccagaagacatcattcgaacagcatctgtatctgtccaagttattggttttgtctacgacttatctaaatcaatcgaaaaatgggaaactgaccgcggtggagatgcgagagtttcgacgcttgctatttggaggactaaagtgccatttggaatcacctgttaaggaaatgagatgcgtcggaatgatcgtgtcggaggtcattttgggatatttcgatgcttccgatgtggaagaagctaataaactaaaatttgattacgatggatttgataaagatacactgaagctagttgactgcttgcgcaatttcaaaaaccgatgcagatttgttgaggatgagctatcgcaaaacctaatcagctcagaagaagcaccgattgatcaactaattgaaaaactgtttgaatctggaagttcagaagctcagctgccgtcatatgaaaatttgcaatcacaaacggtagagcccgtttcatcagacttcaaaatatccgccaagcacggcagtgacgattctgaactcgattcggatgatgatttggaaccgtacgacatgtctaatgatactaatttggaacaagaacaacatcgtccaaagtatctcctagatcttcgtgaaatacttctagacacttctgatcagcatccaccggcacgtttcgaacttgccatccaagctgcaccagagttgatccagcagcagctacccaacaacgacatcaagctagctctcgatctactgcaaataatcctcccacttgaagctcgcgtctatatggaaaacttccaagagtacaaattctccgccttgactgctatatgcagcacttatcccaaagagtgcgccgagtatctctgttgcgagttccactctgagcttagtaaatactctcttaatcgtcgtattctcatgttggacatccttgcccaaaccgccaaagtcctcagcaatctagattccacaaatcgtcaatctaaaactaccaccagcgaacaaccggaactcgcacctacgccaaaaaatgccctggatctgaaattccgcgaagagaatgaattgcttcgcaaacgccaacttgcggaacggatcgttcgcgaacggattgctgggaaaacgcgccatatcacgtctcagcgatctactgcctcctcgtccgtgggcagcaaacttccgaccgcgaatcgtttctccgacgtggcaggatggttctttttcccgctgctacgaggcttcggatccaagcagtttctttttactgcaaacctaaaatttcagtacgatgccgataatctcctgttgaccacattccttcagacgctttcgattctcatgatatgtgctgaaaactgtccgatcggaaggaaattcgcccgagaactgttgaacctgagcgtgatgctgaggtttagtgaggaaccgaaagtgcgcctgtcggtgctgcaagtgctatcgtcgatttttctggcgcttcctaaggcaattctgcggcaggatttctacatggacatagttgagctgaagcagtggctcgaggagtgcgtacaagctagcgtcgtcaagggagaaccaaatgaggagtgccgggaatttgctcggaatgtgcttgttatgtgctatggcgcgttggcagaagattaaaaggggtacaaatagagttatttctttagtggttaacactaatgtgaacactttcgaaaaatatagatgttaaggttaatgaacttgc

SEQ ID NO: 1679 - DNA, 1305 bp, Aedes aegypti
acaaatgtcgtgatgaactacaccgaaatcgaaggcaaagtacgcgaagcaaccaacgatgaaccgtggggccccaccggaccgttgatgcaggaactggcacacgctaccttcacctacgagcacttcccagaggtgatgtcgatgctgtggaagcgaatgctgcaggacaataaaaccaactggaggcgaacgtacaagagtttactgctgttgaactacctggtacggaatggttcagagcgagtggtaacatcctcgcgggaacacatttacgatctgcgatcgttggaaaattacaccttcgtggatgagaacggcaaagatcagggcatcaatgtccggcacaaggttcgtgagttgatcgatttcattcaggacgacgacaaactgcgggaagagcggaaaaaggccaagaagaacaaggataagtacatcggaatgagttcggacgcgatgggtggtatgcgatacgggggcggaggaggaggtggtagcgagtatgggggctaccgggatagctgggatcggagaacagatgaacgaggatgtaagttatattacgacaaggagcgctctaaaagccctgccacccgtcagccatcctcaaccctttcgacacattctggcagtggattctcgcccacctcttcgtcgacagccgccgaaaagaagatcaacctgaatatcaaatccccagcggcggccgcagccacggtaaaagcagcgacaattgcagcagcctccaaacccgccaagaaaatagacatgggagcagcgaaaaatttcggaaaatccaccgacctcggcatcaattcgccaacgcacagaaacacccacgccgaggaaatcatcagcacttcggacgtcggcagtgggaaaccgccgagtaatgaaatcttggaggatctgttccgaacctgtccggctccaccttcggtaggaagtccttccaaggacaccgactttgatgattttaatcctcgggcggacgataccgcagcatccggtaccggtccagagtttggcgattttgagtcagcgttcggtaaaccggcacccaaagcggcgatagtcggtaccagcagtggaggagatgattttgccgactttggggcattcggatcagcgccatcagcagcacctgctgctactgccgcaacgagtgacctgttctttggactgggcacgagtgccacaccagctgcaccggttgctaccgctgccaacgatctgctgtccgatttgggcggattgagcctgggaagcacgaatggtgagtgttttttttttatattctgttga

SEQ ID NO: 1680 - DNA, 879 bp, Aedes aegypti
tttctctgtaaatagttgttagttccaacaattggatccggaacacgtgtgagcgtgttgacgctaatgttgaggaaaaagacgataactcgtgattgtgactttttaagcaacatgcaacaacagtattcagaagatattgtaatcggattacttttgatccccctctcctgatcgagacgaagtgtgttgtaatctagtgtgagtacatggatgctgaattcctatctaaaactaccttacaaattattacacacaaaaaaagtgcatgtatgtaaaaccctaggacaatttttctggaaactaccaataagcaaatatctacacaaaagcaaacaaatctttgtagattgtgtaaaagtgatagtgtgattattttcctactctaaattcagactagggactatagtattttacttcgtttcgattatagctcccaactggaccggactggaagggattatagctcccttctggtatggccaggtgataggagattaggcgtttcccggtttgaggtgttagattttgtacaggttcaaacggttcaaacatgttaaactagtggattgcaaaatttagcaagtgtgattgtcgtttttattgaaaaacacccataaaagccaacttaaaagcattatacctacgccagcaaatgcaggacatatatttttgtgtgcccaaatcaaagaagaaacttagaagacaaaacgaaaggaaactgggaatcaaaacctgcacagaacgcaaaacgaagcctacatttgtaataaacaacactaaggaacacagtgtacttcaagaccggtaaagtgagaggaaattgttaggagacgcaatataactatcgggataagaagtacagttattgtgaggaac

SEQ ID NO: 1681 - DNA, 4402 bp, Aedes aegypti
tttcaatcataaaaccgtatattctcgaaaaaaaagtgcctatttcaagggaaattgccctcacttagacgtattgtgctgattttcaatgttgcagtaaaatgatcaaatacacaagttagaagaatagtgacatcattgttagattcagaagtcccaaatttagtacagtgaatttattcaaaaatctgtcttttcatttgatgatcaatttcacctcagtgtgtcatattcaattgttaataatcaagttaatattttaaaaatgtcaattaattaaaaaaaatcaattacgtaagctgattaggatcaatgaggtatcaattttgtcaaaataatttgaccatttttgaatccttataacaaagagctgtaaaatagtgatcgttttgcccccggtttgcggtacaccaaaactattaatatagacagaaagtgtaagcaaaactgactcatcttaattagcaaataatttggtttgaaagaagataacatagataacataacgtcttccaagaaaaagctttaacgcagcgttgcttcctcttctgaaacataacttataccttgtgcaaaactaccttacgtcaaacttaacatcttggtagccttttcaaagaaattatcaaagttctaagaagcattcgagaacgttagcaaaaaacgtgaacccccaaacattggctgaagaaaccctggttgtcgcgacccacagctgagaaaatatgcactacatggataaagatttagaggtacattttatgaccccgtcaaccttgtcaattccaaaggccagagcatcataaatatcaaacacatttgtgtcacagtgcattttcactcggaagatcgattactgtacctcgattttgtcgcctcatggtagtgaaaacttccaagcatccaaaaataaaccctcaaaaaatgtaccagatcgatgggtaccgtttctgtacctggatcccgcaggcactaattccctttgtcacccgaaagcgtcgatgttgcttaatgcgcgctacctgtgtgggatcactctctctctactgctacacacccatgcgaaacgttttgcagcttcttttcccgattgcagcttcttctattgacgttttcttcgtttagagggatctctccctctattctggtcataaacccaggtacagcgccaaaggccaacgcaaacattactactgctgcagcagcagcaactctagcagctcgatcttccggccaaatccgaaatttggacaaaaacaaaagagtcgcagtgcgatattgtacagtcccacccccaccttccatccacccgcgtcctcattgtcgtctttcgcttcttccttcgctcattcgctgatgacgtgctgcatcccggatagggttaccacgaatttcatgactcaaaaagcaagtatttttttaaaatttcattgaagaatgaagtgaacttttgcaaaatcacaaatgaaaaaaatcggggatgtctctgatattaacgaaacatttagatcattgaaaggatttcgtcttaatcacattcgagccaaaggtcggtacacattttagaaaagtacgacagatggtaaccctaatcttgtagcactgtctcctcacttctctttcttcttccatgcttccttctccgccggtttttttttctcgctccgcattatttctaattagggttgccggtcctgatgtgatcctgaagcaaatctctagcacgcagcatcgcccacaatcgttcgtccaaccctgaaaaaaatgttgaccaaatcgcgctcagtggcgacgacgacgtcggcagtcgcctattcgtcgtcgtgagtcactttttccaagaaagccggaggaggacatcagcagtcgacagcagcagcagcgcaaaatcgccacagtccttcagcaaattacgtgctagggagcgagtgtagaccgagccgaagaggcggtggtggtggatggtagaggccaaggaccagcatcgtcaactgccgctgttgttgttgctgctgctgctgatgatggtaggagtagcgatacttcaagtatagaagccgtccgaaaagggggttcctccctcgttgccgaccgaattttgctagatttttttttctttcgcccaaaaaattaccgccgcggacttgaagtacgcccctcactctcgttcggagcctgaaaggcatctagagtagagaggtagtgggtagcactagcaaccagcaggagcctcaaaggaaggactacgtcgttgacgacgcgcgtgcataagtgatggacaaagtctaatgtgacctgcctggcctgtggtggtgctgctggatgatgaaaaaggaaggaagcaagattgctatacgaaacgcaggacgaaggatggggggagaagggagaaggcgttttttgtgcggtaaatttcggcacagactcacgcacgacgacgcacttcaagatgatgatggcaacgaaaggaaaacgccccttgcggcatctcacggcaacggacaagatcgatgccatccagaggattcacgacggtgagtccaaggcatcggttgcccgagatatcggcgttccggagtcgaccttgcgaggatggtgcaaaaatgaggagaagctgcgctacatgtcccgacagtcagcagagaatgccgaaaagttgaccaatgaggccacagcagcagctttgactgccgtggctgctgcagagctgttcaacggacctccagagaaacgactgaaactagagcaagggttgttcggaaatggaaagcttaagtacgacgacagcttctacaaaagccctcggggaccgatgaatgggcttgatctcagtgggggcgataaaggattgggagtttccggaggtgacatcatcatgaacggactgcacggtgcggatttcagttctaaatccaaagaaatgaaccttaaaggttacggtgccgacctcagcaagcacggagatccaaagcaggcagacctctcgatggcagccatcagtccgctaaccagtctgagtcatctctcgggaatgtccgggctagcgcagagtccactggcactgagtttcaacgaaattgcaacaaatttgaatctctttgcacagctcaacaacaaccacaacttggccacaatgtctaatttaggaggactcagtgcggcccaatcgctgcgtaatgcgcgcccaaaagccaatactagtcagagtccacgcacatcgaacctatctgatgtaaacggcgataaaaatccatcactgacggttcgcaatttggccaaactacagcagaaaaattccggcgatctcagtaatggtatgatgcatggtattaacttatccgacaaatataaacaacaaccatctgctgctcccctaggtcgtgatacaaatgcacccgtcgacgaagctctctggtattggctaaaatcgcaacaagctatgctcggattgaacaatctctactcatcgatgccacgcccctcgagtcctcagcagagttcatcgcctcctcagcaacatcagcaggttcaacatcatccatcgacccaaacccccactccacctatcgtttcgactccacagccaacgcctccatcatctgctccatctttgacccccgaagacaccaagaactcttcatggttctggcagtggtacaaaaccttcggagcgtcgctgatgcccggagacaagtccaacaacaacacaatcaacgcaaatgccaattccaagcaagctgcttacgagaacattctctactcccagctcaccaaaggccaaaattccgactcgctcaacaacaatgctcaacccatcaacctaaacatcatcagctcaaacggtccggaaaatgtgaaatccgaacccgaagatctctccaaccacaatcactcatcatcgaatgccgcagccgtcgccgcccccgcagaggatcttcaacgcttcaaccctagcccgtcgacatccgccaaatccgagcttaaacaggaagacgacgaagaacaggcaggacctgccgacgacgaatcgccaatggaatccaagtgcaacggcaaggtgaaggatgttctggacaactttctgttccagaacccaagcagcaacgatcgagccagccctgcgaatctgtccatccgttccaacaattctccgcgacgtcgttcagtcagcccagctgtaagtaatcatcacgtgaacagtccggaaccggaaaatggcgacctggcgcacaagagcgacatctccgaggattcgaaccacatgctggtggcagacatcaagagttcggctgaagcggttgaacacggtgaaaagttcctcaaatggctagaagcgtgtagcgatccgaacgtgacagccatgcaggttatgcagttcaaatatctgctcaacagcatcaag

SEQ ID NO: 1682 - DNA, 786 bp, Aedes aegypti
atgggccaccctagtgtacacatttcataacatgacaatgctctcatgcgtttgtatttgttaaataaacgaaacaatagggattgaatggtcattgcccattttataacaaaaccatctggataggaaggcaaaatatccattttcgatgtgtacgttgttgaacattcagtgtttcccacagactccagcaagaatggaatcccagctctgctccatgtgccaacgggaatgggcaccaatcgcaagttattcggaagaaaccgatggaattttggaggagcttgccgaatcgttcgaagtggcacggaattctttccgcggcaataaattctgtgcggattgccacaaacttctgaccctaacccaccaaatcagcatcaaaattcgcaaacgcaagcaagccgaggagcagggtaaacccgtacggagaccatcggttggacagagcgagggcagactatcgctggccaagaggattcgttcggcacagcaagccgctcgccatcgggatccagagcatgagaccgttagcgaaagcaaatccgacgaagggaactatcctccagaaaatgaccactgcatcaggttttatcgagagagatctcgatcattgtaaggttaatagtgttttctcgtgttgagtcggtttgattgaatcagttgctttaaaaactggaaacgattaaagattatgaataatttgtctgatattatgacactacatttgatatacaatttcaaaaatgagatcagtcttgacgatataaaaacttataaattatg

SEQ ID NO: 1683 - DNA, 937 bp, Aedes aegypti
tgatcgtattgtgaagtagctacggaacgtattgatgaaaaaatattcatcaaagctcgataaatttcattgtaaaaacacaatagtttatatgttccaaattaatcatggccaaaaatttcaccgagccatctgcggtgatgcgttcgattgagattcatactgccaagatgtgtcgggtttgcttgcaaaggcaccacttggtggccattgcgcggaatcctcgactcgcttggtgtttctccagaatccttccaagcgatcccgatctgccgcaattcgtctgtgcgacctgcgaacggatggtcgacattctctaccagttcgatgtgctaggaaatttgacggcgaatctggttcggacgtacgtcaccgatggagggaggttccctcagacgggcatgatcgaagaggaactacagcgggccgaggagcgtctgcagagaacagcttcttcaaaaaaatccaaatcaccagatgaagacaggaaacttgtcgagagacccattttgacaccggttaggaaatcggaaaagtacatgcgatccgtggaacttctgtttggtgactcaccagatgtcaaacaaaaaatctctaaggttgagtagatgacgaactattgaaaaacagtgcttttggaattaatgtcaatgttatttcgagaattatcaagctgttcgacaaattaattgatgtagttcttaaaacgataatgattgaattcgatagacaaaatcctgatacatattttataaaccgataatattgatgaatgtggaaaaaactaataaattttatgtgaattattttaattatttggatatttgtttgtgtacgtggaaaaacttgttagtttattatgaaatattttaattgtttgataaaatatactgtaacacaaacgtttgtgtaaaatatataatgttagttttttatt

SEQ ID NO: 1684 - DNA, 1643 bp, Aedes aegypti
atgccgtttgtcgttgtgcaaacccgcaagaataaaaaatccaaaccgtgcatgaccgttgtgccggaaaagtgggccaaaagagaccatgtttactggccgccagcaaatttggtatcgctttccaaagatggattttcggaaccaaacattgatgtttggaaaattcagaaatgtaaggttgttggtcgtggctcgtcatatgcggttgctgaagacgtgatgcgacggttggaggcggtcacggactcggaggatgctgtacagtcaactctaggaacacgggccaatcctggcaagaaaaaggtcaaatttgtgccaaaagtgtacgaactgaaaagcagtaagaaggatcacgtaacaagccctccggagaacgaggccacatacccactttttccagtgccaaaaccgcagacgacctcacgcccagaggaattgcgtggcgttgcctccactgcatcacagcaaatcacggaaatctctcagattgaccaaactatgactcagtttgtcattcagtcaggtgacggtcggcaatatgtccagatgagtgacggaacatgtttggaaatcattgctggtgaagctaactcatatgcttcgacgagtactcaaattcaacctacaacacaaagcagtgtaatactggacagcagtaatgttatcaccgacaatgatctaaacaatgttctcgacactacgggaaatcagaatgatcagccatgttctatcgaacaaccgactcaagaagaacaaatgtgtcatgacacctcaatcatgacagtccttcgagatttgcaaggtcgggttaccagaatggaaacgatgctggagaaggtttttgctttcatggccaatataaatcgactcttcgaaaccaaactatcgacaaaaatgcaggatggagatgtgaaaaaatacgacgaagatttctccgagtttgacgatctcatgccggttaaaaccgaggaaaaactgagagaactggagcatcaattaaaaacacagtcatatgcaaacaaactttatagattcttcgaaaccgttttcaaattaaatggcaaacgcgaaggaaaaccattcttccgaaacctactacggaaatttgttgacccgtccattttagtttcgtactcgtggttgggaaattcacgagcaaaaaaaggtgaaccagccaacaagaacaagagtttcaaagacaattttccaagctttgttcaatttgttggccgtattcaaagatctgctgacttcgaattttcggcagaagacacggaagaatcgttcagccaatttctacggcagaaaaatacggagttgaaacggaaaattgcgagatctggcgctccgaaagcctcccacacaaaaaagaggcgacaacattctcaacatctctcacccagaatcgacgaaacaactgaagaaatcgaaaacggagatcttttagaacaaatcgccatcaaggaggtagacatcattccagcagcctcctacagcagttccagttccagtagcagctcagataccgatgttgagtaaaatgtacacttccatgtgtacaaacagcatgacatgccatttcttgccaatatgttaacttattgttactacttttttaataaaagaaacaaaatctttgc

SEQ ID NO: 1685 - DNA, 1134 bp, Aedes aegypti
atgctgatcgaagaactgcatccggaaagctcctacaaacttcggatacaagccgtgaacgagatcggaaacggttcgttctcaccctttatcaaattcaccacagcaccactgccaccgaaaccaccaaaactggaatgtattcagttcggattcgcccatctgaagctgcgttggggcgaaggaaagaatctagcggacctcgctcgatattacgtcgaagtggagaacaatcgcaccggggagtatcagaacgtttacaccggaactcgaagcacgtgcaaggtgatgaagctgcacgaactgaccgcctacacattccggatagcagtcgaaacgaaacacgccggtatgggcgactattcggaggatttcgtgtttgccactttggccgccactccgaacaccatcaaggcaccgagagtgtacatcgaaccgctgggaggcagcatgaacagctcaccgcaacatccttcaagctcgacagcgttgaacggtagcgttagcaatttgaccgcggtgcagggcagcacgcacctcacgaccgggtcctctgcgccggggatggccctgctgaccatcgagtggcaaactagtcggaacaacccattctccgacccgatcgagtacttactacacatggcgaaggcgaaagatcaagagtttagcgaggtttattgcggccccggcacaaggcacaccatccagaatctaacattcggtcaaggttacctattcaaagtgtgcccggtgcgcattcgctccaacggcgaggaaatccacggtcagttctctccggttctgcaccaccagctgactccgcacaggatttcgatttcgcgccactcgggccacgatgaggtggacggatccggcaccaagtactacgcaggaaacgtggtcaaccggcgaggggagttgatcctgaatagctccgattgccaccatcattccggttccgctgggtatgctagttcaaatgtcaacgcgaaacaatctttactgcacctgcccaagggcggaaatctggtgcaaacgatatcggaactgctggaaaccgattccagcaaggcggtggtcggcgttctggtgtttattgtgctgtcggtcattgttgcagcttttctaaagtga

SEQ ID NO: 1686 - DNA, 2300 bp, Aedes aegypti
aaaaagttgcacccgtcccagcagaagaccagcagccaagtagaagtggaaagcagcagtggcagtatcgcgaagattatcgtttcaagtgaaaaatattgccaatcaattagtgcaatcgggtgtaatctttcgcaattcggttgcattgggtagtgtccgtggttgcggtggtgaaaattgtcaagttttcaagaggaaaacctgattttcgatcgctgactgttcggtcgtcttatcgtgatagtctttctacgccgtgattacgcactgctgggtcacaatcctctaggcggtgaccgcgaccagaaagtgttgttttgagaaggtactgctgctactggcttcccgtgtcaattcccttccggaggttccattgattgaatgcaggtttgcttcgctctggctcaaaatcgtacagcggatgcaaaaattgcagtgcaggaatcgtgcaggggaaaggaattagctgctctatactcactacctgacctgcaccagaagcaaaagaaagaaaacggaatcaaacgaatgtgtggttgtgtaaagagtgagttgtgatcgcattttattgtgttgaaatcaaacgggcaaacagaagcagctgctggttgcagcgccgagacgcaagaaatccgtcgtaaccatctttcggtggagattgcaagccactcaaagaggcccccttcccctttcgaattgctggtttccgaacataacaaattattaggggcgaaaggcaattttgcaatagttgccgagttgcgtgtgagtgtgaagaaagaagaaaatcgctgttcggaatttgtgtttcttggaggtggccgagtgcgtaagcttaattgaagagtgggttatggaattcctcggagtggcagatcgttgttgataaggccagattagaaagagaggagatccgtctaaagccgaacctccagcaattggattccggatagcagtaaaaaaatcccagcaaaatgggtctcctgtttgccaaaatatggagtctctttggaaacgaagaacacaaactagtgatggtcggcctggataacgccggcaaaaccaccatcctctaccagtttctgatgaatgaagttgtacacactagtccgacgattggatccaatgtggaagagatcgtgtggaaaaacattcactttctggtgtgggacctgggcggccagcagagtttacgagccgcgtggagcacgtactacacaaacacagagtttatcataatggtaatagattcgacggaccgagagcggttagcggtgacgcgagaagaactgtacaaaatgttgcagcatgaagacttaaccaaggctagtttgctagtgtatgccaataagcaggatctaaaagaatcgatgagtgcagctgaaatttccaaacagttagacttgacctcaattaagaaacaccagtggcacatacagtcttgttgtgcgctcaccggtgaaggactctaccagggcctggagtggatagctcagaggatcaaaaagaaatgacacctgccggagtaaacgtaagggtaagtcgtttatcgtttccgtttcaccgttacgttgccgtgtgtcagacaggatccgctacgatacgctgaatggccaccgtggccccgggtgcaaacaacaagtgagaattttagtttaattccaatcaaatttagttcttaaaagtatacataacgatgaaaaaaatgcgaaacaaaaaaaatctaacaaattacagtaacaaaacccacagccattcagattttagtctgtccgttgatggaatcaaaagaatcaagttggaaataatattggaacttttgattttgtcacgatgcgctttgtcgactgctgtagaaaaagaacgtaagaatttactgaaactgagtgtcaccgctcgccactcctctactgttcgtttagaaaaaaaaaagattgacgaaaaacgtaatatctacagttaaatccatgtagaaatcctaaagaaaatatttgcaaagaacacgaattgaacctgaagggaaacatattaagctttagaacaacgcgaaaacgagagaatgagaggagaggagtcatcaaaatgtcccgtttgttcccccctcccctagattctcccggtgtaaacctgtaggataagtgttttatttctgatttattatttaaaccaatggaacgagagaaaaaaaagtgaaaagtaaactgttgaaaacgaaagaacaaacagaatgctaaaaatgaaaacagagatatacttacatgattagttaatacaaaatgatttaaaacaaaaccttg

SEQ ID NO: 1687 - DNA, 4555 bp, Aedes aegypti
cttcagctagtttgtggcagacgtggtttggattcgggtgagatagttttgtctgtttcgtcaagccagtgaagaatgtactgagaagaaatcgttttatcagtgccccaagtagcaaaacttctatttttcgcttgttaatcggtcctgaaagtagtatttccgatcgacgtgttgcattttatggaaaaagtggatttttcatcgcggtaaagctaagtgctgatgaggtggacccggattgtgaagtcacttctcgggtgtgtacaaagataggcgtcatcgattgtattttccggttgtggttttactagatactggacgcactgccacatgtgagcgaacaatcccgaccaactcgaaaggtgttcatttctgcgagagtgaactgagtgaccagactaaacgcagtactagcccagacaaacagattccgtgtgcagttcgcctttactgctgctggtgtgacagacagaagctaacggagtgttggtggactcacaacgtaaaagtgtcaaaaacggccagaacacgagtcgctcggatttggatttgggttggctgcatcatcatcagcagcagagcagtgtgtgttgtccaattcgataacctgtgttggaagtgtgatagaaaagtccaattactacaggttttaaaacagtgccagtgaatgttcaaggtcttctgtggttgacacatcttcggtgctattccctgggggaaggtgtacaagtgtgagattcattgctttgcttgacctaaaaaagattaacttgtgaagccagcaagtgcaacaacaacaacagtagaaaacccgaagaaaatggcagatgtagatgatgtgataagtgaccaggagaagattcggatcgtgaatgacttcattctgcacgctcctccgggcgagttcaacgaggtgttcaacgatgtccgggagttgctgaacgacgaccggctgctgaaggagggggccagtgcggcctgtgcccagtacaacaaggatcagctaacgccggtcatcctcgagggctccgggctggccgtgctcgtcacagagttcaacgatctgggtggcggccgattcttcgacccccggaccaaacagagcttcaaattcgaccacctgcgcaaagaggccctcgacctgcagaaccacgagtgcgaccacatctcggaaccgtggcgctccatgctggacatcgaaacgctaacgtactgtgcgaaccactaccggaacggatcctgctcggtgtacgggcgcagtaacaacggacagatccagctgagcatctgcatcgaagatcaccagttccagccgaaaaacttctggaacggccggtggcgttcggtgtggtccatcagcttccccgcgtccggtggtggcacggccgagctcaagggcatgctgaagctgcaggtgcactactacgaggacggtaacgtgcagctggtgtcgtcgaaggagttccgcgaatcggtggtcatcacgaacgaagccgccactgccaaggagatcctgcgactggtcgaggagagcgaacacgactaccagacggcaatatcggagaactaccagacgatgtccgatacgacattcaaggcgctccgaaggcagctgcccgtgaccaggacgaaaatcgactggagtaagatagtgtcgtatagtatcggtaaggaactgaaaacgcagtagatttattaaggactttattactattattattattattttctatgcgagaatgggggatcgtgatgtatgcagggggatagaagaacaaagtctaggaaaacatacacaaacagacacgagcctgctcgcgccggtgggatatgtgcattcgggcacgaagagggggtcgcactcgtgtcctccagtaggtatcgcttgtcatagtctcgtcgtcccacgccaagcagacaggggttaatctagctaggagagaggttatgtgcaagctaacgaaacgacgcggaaggctaaacacaattattaataaatttaacaaattacttccgattggacggaagatcgcacgcaatcaagccaatattcgacgcagtaatatagagggaaaaaatgttgtatgttttatgattggatgcaagcgacatgaaattaaggtaaaatcggaggatttttgatcattcagagggttaacgtcacgttggttttaaataaaattcattcattatttatttcgctgtttcagaagtatgtttcactggacagtataagaatcggagtaatctttatacttgactgttggtttccgtttgattacaatctgttttcctgtcggctgaagatatcattggattggcattttagaattttcttaggtattactgaatatcttcaatgaggagagctcttggcgaaaccaaaataatctgaataagattcttcagacatagcaatatggaatggctgctctgatcttctgtgcctatgttttcaatacaattcaggtgtttgtcgttgtactgctcccacatttcaaccaaggtcgggatttattcaggtggcgcagatctttttccactgtcctgcaatgaatctgtaatgataggagcttttggcgaattctaagcaatctttatacagttagtcagccagaacagtgttggatggctgcccagatcttcgttacctatgttttcagtgcatttcaggtgtttgcccaagtactgcttccaccgttcaaccacctagcctagtcgttgagacattcttgttcttactctttaacatttcggcttgttaaaagacctacgttttcggcggttgtgttgtggcggaatccatagtcaaatcctttttcagtgtacaggaaatttgactcaattttgagtttgtgacacatacccaattatacacagaaatcaagttcctgaagtggaaatatgcaatccacgttactttcagtagttcaccactgtaattggtgactgtaaccatcttccaatgtgacgtccatcttttcaaaatgctcaaaaagcacaaaactaaaccataggataaacggattcggtccgcctaacaaacagattcaaaccagcgtaattcggtaatattttgttgaacgttgtcgtcatcaaaagatatacttttgtctataatagaactactgcgctgtaaatgcattgccgtaagctgtaaggatagtaaaagtaaaacatattgaaaattataaaagaacggaatataaagtaaaatcaattatagcatacatcaaaaactcgaattcaccgacgtttggcctgcaacatagaatcctagttaaagaaaaaaaaaaacactgaaaaacctccttttctattaggtagttaacgattctacacgaacactgacactcacacatacagctaaatcggtatccttgtagaaacatagaaattgaaccatttggtatcgtagagacgatacagtgatgatacttctatgcccattgatttatgattatagtccaggtaacaccaagcacttaacgcttcaaactatcgatgtagtgcttgtacagtgctaataagtaatttatcagttctatatgagtactatatgtccgatttagcgaaacttagcactccacttgaattgaaatcatgatggcaagatgatttgattgcagacagtgggactcagaactcacttgcgaggttcttgaaagtacgaaaatttttcgattaacttatgtatcacttctagacaatgtttgaagattctttgcgcttatagactggtaaatataaatgtctgaagcattcacgtgtataatactgcaaggtcccataatttcacattctagggtcaaatagaaatacacccctttcctcagtagtagaaagtggatgcccaatccaatcattaggctttttagaaccaccccgacatctagtattacattgaaaacttaaatactaatgcaaaagtaggagaatcactaaattagctaaacaagatatcggaaaaaataaggagaagcgaacaaaacacggcattgcaccgtttcgtcaggacgtagaagcgtaattttgaaaattctttcgagtagaaaaaatattcatcaaaatgaggaagaatcgcaatttaaacacatacacattttcacacacatatacacacacatgctgcatacaataacgataaatgtgtcgacgaaagagataaaatcagtgcgttaaccccgaacggtgatcagagtcagattaagcagacgaagaaaaagaacaagctgaagacgacagaatgaaactttaagtggcaagctaccaattacagtcacaacaatgacaacaaatacttcaacacagtaaataagacagatataaaaaagcaaaaattgcacgcgcagtaaaccgttgagtaattatgaaataaacgaaaattaagcgaacaattgaggaaaagaagaaaatgcgatagcagacagacgacaaggcgaaaataaaaataaactatataaaattgaaaaaaaaaaagtaataaaaaataatgtatatttaattattattacatatatatgaaaattaaataaaaattcatataaaataa

SEQ ID NO: 1688 - DNA, 2310 bp, Aedes aegypti
atggaaatcgcacgcgaagattggatcgatcgagcccaggagaacatgaagaagtttctcaaccggggcggaagctgccgcggagatgaaccgcagcttcttcaggggaccagtctggagaacaccctcggctatgccctcagcctcaccatgaaggacccgaacgagtggaccgatgaggaactgcagatggagtatatggagcaattgtgcttctacgacgaggaatcttgtaaaacaatcgacaagctggtccagcagatgtacaacggtatccatcggaacgtgacctgccgtttgacgatcctaccgattgagctgtacagcgaagggaagctgtacgaagtgccgctgtttcggtaccactttcagcaagcgaccgacacggagccaaagtttatcgattccatcgggagggtgtatcaggattttgacgattttttgaagaacaacaagtacccgtcggccgagatgatgtacccgaaggagggtcgactggagccgacgaatctgaagaatgtggtgtacgatatttgcaagacaccagcgtggaagaattactacttcaaggcgttggatatcgcgacgggaatcattggtatcgccggtgccacgggggccatcttcctatcgggcgggctggccactccattcattgcggccagtgttgggtcggctatctacgctacggggcgctcgatcgatgtgctacgcgacaaaagtgcccaccaagagtcgctgaatccgctgagcgattcggaatctcgtacggcgtggctcagcctgacggcgcacgtgctcaccttcggaactatgccgcacatttcggccctctcgggggttgcttccaccagccatagtatagcaaccgggtttaaggtgtgcaactttatcaacgaaacaggaaacataatcagcgatctggtgatctgcgatacactgtcggcgatgcattccaactactacaacgccagcatcgagactcggctagcacacgcggcctcgatctgcttctggaccaaaacggtgatcagcatccgccaggcggaactgatgatgaagaacaacgcgatcgtggcgctgaagttgttcggctttgaggaccatttctgtgagtatttcaacaacgattcgcgagcgatcgacatcgggctgaggattgtgaagcactcgctccagaacaacgtgacgatcgcttcggacaaaacggacgccaaggcaatcacgatcgatgggttgaagttcgatatcgaaacgttgctgaagttggaacctgaagaagtggagaagttgttcgacattttgcaggcggtaagtagtgatcttgatcggacggctttcggagagttacgtatgctttgcgaaagcgatgtagacttggtccggctgatttcggcggaagctgaaagagaagaacttccgggaaatgaggtggccgaaatgttgttgaaggtttacgaatcgatgaggagccaagacaagttcaaaatgagtctcagcgttcaggacggcatttgtataggtaatgggctcatgatggggatcaaggcagcgtacataatctttgcttctaaagatgagcaccaggccgtggcaccgctgatagacgccgtgctagagcttccacctgagcagtgcgaagcactgaccaagataatcaaaaccaaaccggattacatatcaatttttaagctaaaacctagtgatgctagcagcgaggagattagtagcaaacttagaaatgaaatttcgaaggccttatcagaagagcattaagtttttaacttttaactacatgaacgctagcgcgagagcgtgtgaaatttaatagccaaattttttaggaccatagtaagtcactgttagtaaaagtgaacgaatttttaatgcaccgcaaaaaagaacagattttctcggatcgggactagcactgatgcgggagaacacacgcacaaacacgaaatatgtaatctactagggtgaagtagtgaagctattaatgggcggcaaagttttctataaaacaaaaccgatttctagtgatgacgctttaaagttttgaacttggaaacctacagaacaacaacaacaaaaatgatgagactaatgtgcacctgtttagacgaatttagcgcgcgtaacgtgagttgtgtagtgaacgacaccaaaaaaagcatgtaatactactagagtatagccatatagaaatattgtaatatgataaaacaaatagcttggtagagtgtagtagagtgatgctcattatgagagaaaaaaaaagttgaaaacaatcgctcaaagcgaataatt

SEQ ID NO: 1689 - DNA, 2544 bp, Aedes aegypti
ggaatttccagcggaaaaatcgctggaaaacaacattaaaagtctagtttttgtccgtgaatgtgctccgcgaaaagtccgaacttgtgctcagtgccgtgagaggaggagcaggagcaggaggaggcgaaagccttctggtcgtgagtcagccagctcagcagcagaatgcaaaaaatgcatctctcccaggatgtgtccagcgctttgcagcagcttgaaattatcaagcaaacggtggaggaaatggaccccaataagctccagctgaacgtgatggacgatctgaagatggtgctcgatttgctgcaggatccggtcttccggaacattgtccagattcaggattcgttggccgagctgaacaaccagattacgcagcatccgtcgatacttccgggggatttcgacattgccagcagcggggagttggtgctgaatgttcccccggtttcggacttgttcgaagcggactatccggatgagcagagggtaccctcggcgcagatctcgcccggaagtcctgcccctccacatttacagcagcagcagaaggggggaatcatgatggaacatccggcgcaacaaccactgccacctttacccgttcaattgcagcatccgccagcgatgaagatgaccaatgagctgatgatggatagcggagtcggagaagagcacctcaagttggattctcacgatgaatcagcactgctgcaaggaatgcacgatggatccaaactatccggtgacctggctgctgaatggtcccggattttggacatcgagctggttaacgatggcactgggttgggattcggtatcatcggagcacgtgccacgggcgttactgtgaagacaatccttgccgggggtgtggcggaccgagatggaagactgcaatccggagatcagattcttcagattggcgacgtcaatttgcacgaaatggtatcggagcaggtggcttcggtgctgagacaatcgggaacgcatgtccagctggtagtggcccgaccgatagatgccactaatggagccattgaggagtttgagaattctgctattgtgccaactgctttgcttgctaatccgctcaagctgaagcaatatctggcagattcgggctacccggaaatatttagcgtgtattctattgccaatttggacaaggacagctttgacaaagacagtcccattgatttcccagagacggagattttcacagttgaactgaagaaggatcagaatgggttaggaataaccattgctggttatgtgtgcgagaaagaggagttatcgggaattttcgttaaaagcgtttcacctggaagtgctgccgatctcagtggtaaaattcaggtgaacgatcgcatcatagactttgacggccagtcgattccatgggttctcacgagtaccgggaaaaagatgatggatgcatctatcattctcccgccgccttcaaacgtcgaagcggaattggatttgcttctagcggagaccaccaatcaggcggcactgatcaaacatggcaagcaacgcagttccctcaaggtcaacgaagataccgaggctttcatcgtcaaaaagtggaacagtattttgggatcggatgttaagattatcgtggccaatattaggaagtttgctgcttcgagtgggttgggcatttcactggaaggaacagtggacgtggaaggaggtaaggaggtacgaccacaccactatatccggtcgattctgccggagggcccggtcggacagaatggtttgctgcgttcgggagatgaactactggaggtcaatggacaacggctgctcgggatgaaccacctggaggtggtttccattttgaaggagctgccccaggatgtttgcatggtttgcggccgcggcgatcaggagatgttgcagttcaccgaggaagcgcttatcaacacactggaagaggaggccgccaaaagccgcgccggtggtctccagagcagcctgaccccatcggaaaggttggtgaaggccaaaagcgatggcagtttggccacgaccgggggcgccaacgatggcttctcgaagatcaagtccaggagcttggaaccgttgacgggattggccatgtggagctcggagccacagatcatcgagctggtcaaaggtgagcgtggtcttgggttttcgatcttggactaccaggatccgctggatccgaacgatacgttgatcgtgatccgatcgttggttccgggtggggtggcccagctggatggacgactgatccctggggatagattgttgtttgtaaatgatacggtgttggagaatgcttccctagatcaggcggtccaggcgttgaagggcgccccgaagggtgttgttcgaattggcgttgcgaaaccgttgccgatgcaggactcgtcgataacggcattcgagggggacaaaggtggcgatgggggcgcaatgggatatcatggaaacgatggcagtcgcaactccgtgggaaaaatgttatccatgagcaagcctgatataattatggaatga

SEQ ID NO: 1690 - DNA, 1928 bp, Aedes aegypti
gtgttttgacagttctctctctcgcgctcttgttgttttcgcgactcctctctcaacaagccgaaagccgccgtcagtcaaacggtatttacaacagacaacaaaaaccttccccgtaaaaaagtacccgcggcgtcttttcggtgcattatttttgctatgtgaaaaaatgtggtgaaatttggttgtttaagtgttaaaaagttattcatcgtgcagaaaagtttacaaattccaattattaacagtgtgattcggctgtttgcaacggattattgaacacgccagccagaaagaaaacaaacatggaaacgccgctgaagaacaaagtgctaaccaaactccaccaaggggatggcttcctgacaccggcggccagttcctccgcctccgggaatgaacgttccagtcggcatctgaccagcgtcacgaagctgccgtcgtctccatttctgaagaagctcggcttcgggacgggcgtggaagtgctccgaataaagcggtccccaacgaagaactccacccgatcgccatgggccatcaagatgctgtcgcggcggaacgatccggagaatgccaagcttttcggggaccggttgaccgaggaggcgggcatcctgaagcaactcagccatccgaacattgtcggatatcggggattcgattcgctggaagccggaaaggaatacatcgcgatggagtactgtaacacttccctgggggatttgctgcaggcgcggtacgacgatgggttgggctccctggaggcggcaaagatccagcgaatgtcattggacattctgaatgccttggattatttgcacacggaagccctgatcctgcacggagatttgaagtccttcaatatcctggtcaagaacgacttcgagatttgcaagctgtgcgatttcggcgtaagtttgccacttactaaggagggattcctggacacggagaagaaaaaggacgcccaatacgtgggaacaggaatttggtccgctccggaagtcctagaggaagatgtgacgctaatcagttccaaagcggacattttcagttttgggttggtggtttacgaaactatttccctgctgccgccgcacacgttcccggggatgatggacgaaagcattgccagctcagcggattacgccgtcatgaagtcgattatccggggaaattccgaaggcaagcccaccaccaaccggaagttggacattagcgaggtgattgtgttggatgacaccgaagaagagaaggacacttccatatccggttcggcgaaaaagaggaaaatgtccctcaaatccctccagagtgaacaacccgcgaagaaagtggctccggagccggattcaacgacggacagcacggtgataagcgtgccggatgacagtattacgacggtggacgatagcgccatcacaatcgacgatgatgaggaagaaggcgaggaagaggaagacgacgcgatcgaggatgaggacgaagacgaggagtacgatgaggacgaggaaggagattacctggactacggaaggctgggaaccagaccggccattccggacggtatcaacctctccgatgagtacaattttatactggagatgttttacgtgtgcacgcaggaggactatgaggcgagaccatcggcaaagaccctgctcgaggcctggcacaagaagaccgggaatggggcactggcgacggccagtgacgacgctaaagatctgaacaagaatgagacggctggggaggaacagtagacgaggacagtaaaacgaaggtaagaaataattgttgcaaatagttaagaagtaatttaaagaaaatttcaacgtttattcaaattaagcggacaaaatatattttctacagttcacaatattaatcagaattgaggaatcttttggattgtgtggtcggta

SEQ ID NO: 1691 - DNA, 573 bp, Aedes aegypti
atgaaggcctttgtgttgggatcagtgctgctggtggcttcggtatgctccggatcgtatattcctcgcgatactcctgaagtggccgctgccaaggctgctcactttgcggctcatgctgctgccggaatcggtttaggcggccatcactggaatcatcacgaagcctctattcagaagtggcacggaccgatccacattcccaagatctacaagggcgtcccagtcgaaacccccgaagttcagcatgccaaggcattccacgctgccgcttatgccaaggtcgccggatacgctcagcacgatgaccattatgatggacatcatgacgcccatcatgtcccagttcatcatgaaggcggagcctggcacggacccatccatatcccaaagatccacaatggagtcccagtggaaacccctgaagtccagcatgccaaggctttccacttgaacgctctggccaacgctggtgctcaatcctacggaccttcctcttgggccgaacacggtcaaggacacgaagatgatggctcctacaaaccccatttgtatgagtccgaacagtactaa

SEQ ID NO: 1692 - DNA, 1592 bp, Aedes aegypti
gtattttttgaaaatgtatcgattctttcaataattctgtgtagcgtgaagattcaaatacgtttctaattaaccctcaaatggctgcaatagcaaaagaactgtgccgactttgcatggaaccatgttccatggatgtcaggaccagtcgttccattcaagatccggaaatgcattccaagcttacttccgtttttctgtttgaacttccgatcgagaactccttaccgaatgtggtatgttcggactgcgttcacaaagtctccgattggtattcctaccacgaaacggtgcaacttaatcagcatcaattgaaggaggctactatcagggaaaaggagcccaaatcagaaataacgctggaatcggtgaagctagaaattcatgacgataattaccaggacgagcaagatccagtagcatccgaggaagtcgatgaagagatcaaacaagaagatgattacaacgtagattctgattcgagtgaaagcagtgaagaaccagcaccaaaaagaactaaaaggaagtacactaagcgatctgcgttagatgtcgagaaaaagaaaccagatgaggcgaggatccaaaggacaaaggaagaaaacataaagattagggaattcttcaagctaacttgtgaggtgtgctccgagacatttgacgagttgtaccggttacaacaacatacccagaagaagcacaatgtacgtgctagcatcaaatgttgcaatcgtgtgatgtataagaagtgcaggataattgaacacattgatgcgcatgtgaatccaaatcagtttcattgcgagctgtgtaataaaagctacaaaacaaagtattatttagatttacacaacgttaaatcgcacagcagctcggaagagaagccgttcaaatgtgaaaaatgccatcgaagtttcccaaaggcatttcttctgagggcccatttgcagactcatgtccaagcggagtgcacaatctgtcacaagttgctggctagtgcgttcactttgcgatgccacatggaaataatgcatggcgagcgtgcaagtctggtttgtgaaacatgcggccaggaatttcgtaccaagttgggactggagcgacacatcttgagacaccagggagtggttacgatcgaacgggttcagtgccacatctgcagcaaatgggtaagcggccggcagaatctgaagacccacgtaaatatcatgcactctgagaagaacaaaccggtgacgtgtaatatctgtaaacatacttatccgaacgtgagggcaatggccagccacaaacggagagtacacgttgaggaaaagtttgagtgcgaattttgtggcaaaaagttcaaaaggaaaatctatttaaaggaacaccgagcatcccatacgggtcaaatcttgtactcgtgcgatgtgtgcggaatgactaccaattccaacggaaatctgtactcacacaagaagagcaaacacccggagcagtggatggaagcgaagaagaaagcgatcgagttggcttatggataatttcgaagatagtagttgaatttttttttcgttttaaatataacaattattattctctaccacatg

SEQ ID NO: 1693 - DNA, 1319 bp, Aedes aegypti
gaagatattcaagtttctatagtgtccatgttaactaagtgtaattccgcgcagtgagattttaatttgtcgtgatgtaaattgtgaatgaaaacagtattgaaaagaaaaaaaatctgttttgcatcgtcgaataatcgccaattttataaacaaaagaaaaattgctgcctgttgtactcaccaatccgtgattaaatatcaacttgtactatggatttcgcatggcaagatgtatttgaattcccgcctttctttgacaatcaacaagacactgccaaagcggaacacactcctactcctgtgctagaagatgatcagactcatttgagcttcttcgaatcgaatcaatgtgacgcagtgtcaataccacaatcatacacatttagtgagtatggaatgcccatttactcttcgctggaagcctacgaggagttttcaacgacgaacaactatatagacttgaccacatcggagattgacgcagcgttggcagactgttatctagttcaaaatgaatcagtcttgacagaagtgccttactaccctgttgaagactattctgttgacacagcgtcgtcagacagctatccagttcaaaatgagccagtcatgacagaagttccttactacactgttgaagactatcctgttcaaccggcggcttgttctgcggagcctcaaactcaatcggaaccacaagaacaagccccagctcctgcagaagtcaccttccctataacattcgagataacgggatatgtgaacacggaggtcctcaagtcattaccagcaccgaagaagaaaactcgcaaaagaaaaagttgtttggagaagtacagcagcgaatggaactgcgaaccatgtggaaaatcgttcaagtcaaaaggtggactatcccagcataaccaacagcgccattccggaccaacaccgcatggctgtcgcatctgcggaaagcgatttcgtgattttgacaccatgcagcaacacacccaacggcatctgatgaaagataagccttacaagtgcgaagagtgtccgaaacagttcatacgatattcggacctggcgcgacatgttaacctgcatcatcgggagtgcctacacaaatgtccaatttgtgggaagccattcgacaggaaggatcacctgacggatcatattatcagccatcagaacggtactgtgaagaaattgaaagtccgaacactgagtcagaccatttgctgaatagcgagtaagtcagaaaatcgcaataaatgacgatattttagaaatcaaatgcatgaaaccaaaaaaaatccgttggttaaaag

SEQ ID NO: 1694 - DNA, 981 bp, Aedes aegypti
atgaaaggttggcaatggcccaccgggaacgaaatctacccgcagaaagacgaacgcctcggaaaagtgatccaagcacttcaggatgctgcgatactctcagcccggaacactccaaggggcacccagttgaagttgttgttcgacttggccgggaaacagaccgtcctgttcaaacctagctggtaccgtaggcataccattatcgagggcacggtctactcgggaaaggatcgccataattcggaaattgtggcgtttcatctcggcgctatattgaatcttcgctggacaccgatcgtcgtgggacgacgagtttcattgaaggaaatctaccgattggcggatgatgagttgcaggcgaccatgaacaagaacgacactcgacagtgcgtgtacggcaaatgccattactgtaagcccagtgaagctatctgcgacgatccggagactgatcaactggaaggcgcattgcttctgctagtaccaggaaagttttccaagtatcgttcaccgtggcaaaggacctaccgggacggtgtgcaagccgagtgggaacaagccgatggatattgcgggagggttaaggaacgacttccattggagcggttgttggatctgatcgatgtggcagttttcgatttcctgatccagaacggcgatcgacaccactacgaaacccgagaagataggattctgcttatggataatggaaaaggatttggacatccttttaaggatcacttcgatatactggcaccactgtaccagtgttgcatgatccgcaaaaccacatgggagcgtttgcagatcttttccgggggagcccttacggaaacgcttcaagctttgagtgaaatcgatctccttcatcccctgctgaccaaagaccactacgacgccatcgagcggcggttacttctcatttacacaaccgtcgaaatgtgtcgggaaaaatacaatagtagaatatttaaatga

SEQ ID NO: 1695 - DNA, 717 bp, Aedes aegypti
gaaccacaactacaagatgctcccattgagacgttgccaggtgcaagacctccagcagaaacaaatcttccacttcgagaggctccaatcccagaagttatccctgtaccaaacaacagcatcgcaccgaaagcgcctgaaggtccacgacccaattacgaagaacgcccagccactcagaacaatccgctccagttgaacgaattcggtctaccacccagtctgattccactatcttcctacaatggtgccccggctcaacaccaacaagcgtacaacctgcctggatacccatacaacttcccggtcctttacgattctttcggaaactacaacccaacacaatatcaatcggtgctgccacctttcggatacttcccccaactggctcaaccgaatccttactttgcccaaaatgttgtccccaacggaccactgaacaacgctgtcgatccgcagcaaatcaatcgtagcggccgtgaacaggaccttccggagcccacgaaagaagatctgcaaaatgcccctcaagaaggcaaagaggctgctgccgaaagtcaaaccgaagcggaacccacggaaggcgccaaatccgaggagagcacaaccgtgcaaaatatccccgacagcatcaagaataacgccaacaaaaacaaggatatcccggatgtgcctccacctccgattccatccggcgccaaggaagccgatcagtaa

SEQ ID NO: 1696 - DNA, 1077 bp, Aedes aegypti
atgaaacgaaaacagcggagatacagaaccacgttcaattcgcttcagctgcaggaactggaacgagccttccagaggacacattatcctgatgtattcttccgggaagagctagcagtaagaatcgatcttaccgaagcacgtgtgcaagtgtggtttcaaaatcgacgcgcaaaatggaggaaaaacgagaaggggagtgccattgaagacggcgatggagaatctggagcaaatgagccgagtagtgggagtccttcaggagcaccaacgcgatctacgtccgaggatgctccaaacaacatcaactatgataatgtatcacaaaacattagcctcgctaacatggggttgaatcttcaggagaacagctcacaagtgcatggcttcgacaacgatggaaagctaaacttagggcagatgtctcctggacggatatcaccgaatttgttcctgaacctaaattttgatcacataaatccagtcgacgggagaggtggtaatctgaccttcgagtggaatagttatccaaccaccagcacacaaaacagacaaaactccacattcccttgcaatgtcacggacatgaatggtatcatttgcaatacatctctcggatctacgatttcaccttccgccagtggtccttcttcatcatctgtgaacaacggccttcagtacatgaacattagcagtctggtgaattcttcgccaccttcatcctcttccgtctatgacgacgaaatgaagttcctaaacgttgatcacttcaacatggacagtttcaaaagcgaatcgctattcagcctcgatcacaccttactgactgctagcgatcaccaatcccaccatcaaagtcagccatcccagacgcaacaccctttggacattggctgccaacatggagaaaaggctcacctcggtttggatctacacaatttcaacctgaacgaccccactggacacgatccggataaagcggacaaatcgccctcagaactgttggacttggagaaacccataaatatcaacatcaacgtagaaagcttggaccagttggatgatgataaatattga

SEQ ID NO: 1697 - DNA, 2241 bp, Aedes aegypti
tgatttcctcaaacatgtccaaaaaacaaaagacatcgaacgcgaacgcttcttcgctgacggcggacgccatccgaacgcgcaccgaatcgttggagtcgaacttccactggttggagttcgatgacaactcgacacctaagccaccgatcgatccggacacttggctggaaatcggccctcggctgcaaaccatcgaccaggagaccaagttttgcgacgtggaaatcttgcgggaggttctgcagctacggtcctcgctggacgatcgcgatcaggaggaagtgcgatgggctcggaacagatcgaatccgttcgatgtgaaagcggggcagtttatgacccgagccgcggtgaagatcgccaatgtggatgccattttcgggtggcaactgtgccagaggggtgaatcagatgatctgatgtacttcgtggacgttttcggagggccgggaggttgcagcgagtatgtcctgtggcggaatgatggttggaacgcgaagggattcggattcagtacgaaaggtgattacgagttccatccggagatgttccggatgggagcgccggagagtttcgatccgttctacggggcgaatgacgaggggaatatctttgatccggagaacgtggcgtcgtttgtggagtacgttaagtcacaaacggaccgactaggggcgcatctgataatgtgcgacggaggattcttcgtgaagaacaattgccaggagatcatctcgaagcagctatacctgtgcttggtgctgctggccgttgcggtcataagacccgggggaaacgctatcctgaaagtgttcgatctgtacacatcgttcagcgttggattggtgtacattctgaccaagtcctatggaaaagtttcgattgttaagccggcttccagtcgaccagccaattccgagcgctatctggtctgtcagaaccgattaaaccgggaatcactgttcgcgaggtacctgatgtcgatcaatcaagttctgtgggaaaacaagcactgcgatcacgacataattcatctggtgtccccaaaaaccatgcaagaggacaaggacttttacaatttcattcggaattccaacgaagatctggcccgcaaacagatagccggtttgaaggccttgatcgacaacgtccagggcgttcgcccagcggagaaagtcgaccggcaactggtacaggacactttatggcgccaatggaagctggaccacaaaagtcgggtttcgccgaccgatggatttgccaaatgtgccccagactacgccttggagtgtgtaggaaaggccaccctagaactgttcgaatcatctgatacaccgctctgtggtaagcgaatgcttaagaagaccttcggtaaccccaacgattggttcttcatgccggttgatgtgacggcggatcagggcagaagcatccggacggtgttcctaagcaagggcaatggcaacgtgttctgctacgatcgggagaaagccaactggacccaaatcaaggactatcaggtggttctgtcgccgcggaccgttctgtacggggaaatcgttgaggaaatttccgccaagggtgaaaagcagaagatcgtccacgcgttgcacattatggacgccattctgctgggcggtcaagaagtccgtgccctccccctcgacaagcgaaacatcctttgctgcaagttcgccaaagccatgaatcgacctctttcccatcaaaattcgtccaccgttcgtccaattccggtgcgatgcaagacgttgctccccatgatggaactggacagctttttcagcaacgtttccatccacgagctgatcaacggggccaaagtgatcggaagcgatctggacagcttcgatgcgcaggaatcgaaacgattctacattccccgcggattgctgttcgtgcggagtgttcaaacggcctcgaagggagccgagaagcagctggacttcgggaaggcattcgccagccgtattctgtgggcttggagcaagaccagccagatctactcgtcggcgcagcggttcgacgtggccaaagagccgaacctggtctatcggcaggatttcgatgagtttatcgaaaagtgcggcgataagaagtgacacgtacgctatagacgatacgctctgaagggcggtaggtagtctcgaaaggagactacgaagtttatgaatttaaattttgatatgtattatgatttgatcgttcgataaatgtact

SEQ ID NO: 1698 - DNA, 1338 bp, Aedes aegypti
atgtgtacggcttcggagcgcgactgcgaaagccccaaaagtaccgtcttcaacgctcacaaagtcatcctggcggcatgttcgaagaacttcgccgacctgttcgagcgggccccagttggcaccggacagatttgcgtcatgctggaggccacttcggccgacaacatgcacgctctgctggagttcatgtacaagggtgaagtgcacgtttcacagaaatcgctggagagcttcctgaaagccgctgagaatttgcaggtcaaaggtctcaccacagagcacggtcgtttcgcgagtgcaaatgccacccagtcacagcagccggccttccacgagtcaaacaacctgccctcgccagcctcccgccgacagcagcggaattccctgtccgcctcgctggaatcgatcaaccggatcggtggtatcgtgaaaaatgaacccctgcccggaggtggtggtggcggcggagggggaggcggtgccggtggaggtggcagtggaggtgccacaacgcccaacttctcgtcctacctgccaccgacctacatgcccacgccgtacgaaagttcccggaagcgttcgatccgcagtccgttctacgaggaagccacacggggtagcgtgctgcgggacggcaaggccagcgttggcaacgacagtccggtgagtggcagtaaaaactatcggccctcgagcagcggttcctcggcggcacccaccgaagcggatacggcacacacggaccgggattcgccccagcagtcgaaccggtacgaaaaccacagccccagcactacccaccacggcaacggaaacggaccagtatcatcgaacacgttagaacgggacgatcggagtgatcgggcgccttcggaggacaaaatcaaatgcgatggcaaggaaggaaacgacaacggtgccgaagatctgcgaatgaaatcgaacgaaatgcgaccgatccagtcaccgctgacgtcttccgccccgcccaccccgacgacaccggtggcattcatgaaaggaggcctgcccggaggactggaaggactgaatcccaccgtcgatatgataagtatgttgaacgtccagcgggaaagtgtaaccactgcggacggttctctcgctccaggcaaaaagctacagtgtcccctctgtgatcgccagtacggctacgaaacgaacctccgcgcccacatccgccaacgacatcagggtatccgcgtgccatgtccctactgtagtcgaaccttcacccgcaacaacacggtccggagacatatagcacgggaacacaagcaacagacgcagtacatgaccaaccagctgcacagttaa

SEQ ID NO: 1699 - DNA, 1257 bp, Aedes aegypti
atgtccaaattcataatcgatagtatgctaccaaaatacgcacagtttcagccattcattagctcacagatttcatcacagtccatttccaattcgaattcaacagtgtcacagaccccaaactctgaaggtagtccattaaccacaggtagtgaaggtagtccgaattctccaccgaccagcaaaatgtatccgttcgtttcgaatcacccgtcgtcgcacgccagctactcaacgatgccaggcttttcgggcttggacgacaaatcgtgcagcagtagatacacagatagcgttatgaatagctatccaccgatgggagttcccggtagtgccagtattgcccagttctaccagcaagcagctgccgtatcggcagcttccgccggcgtcggtgtagattccctcgggtccgcatgttcacagctatcgtcgtccgtcggcggaggccaatctggcctcccagacataacccgccatccctggctcgtgaccgcatctcaatccgcgctacagaaattcgccagcacagattggatgagtaatcccttcgaccgagttgtgtgtggagattttgcaggtcccaacggatgcccgcgtcgacgaggccggcaaacgtacacccgcttccagacgctcgagctggagaaagagttccacttcaaccactacctgacccggcgacggaggatcgaaattgcgcacgccctgtgtctgaccgagcggcagatcaaaatctggttccaaaatcgccggatgaagctgaagaaggaactgcgggcggtgaaggaaattaacgaacaggcgcggcgcgaacgggaagagcaggacaagatgaagaacgactcgttgaaatccgcccagcaacatcacaacagccagaagcagcaagagcagacgatcgtcggttcccagcagtccagcggaggaggcggcggcggcggtggcggtggtggaagttcgagcctcggcagccacctgcaccatccgtcgatagtggcccagaacgatctgaaactcggcctcggcagtatgggcgtcggcgtcggcgtcggagggaatctcagcatgatgggaggtctggataataaaaccaatcaggatatactgaaagcccgtggttctcttgtccgggagagtttcttcacggttaacgaaactatattacgattacgatggacgacaagagaatacgttattgttgctttgttctatcctgtcgcagcaagttccttgcttttgaagtttcgcgattga

SEQ ID NO: 1700 - DNA, 1083 bp, Aedes aegypti
atggcctatgtagtggctcccaatattgaacccttccgcaagggtcaaactttcgcaacttggatccgtcgtttaacctatcatttccgtgtgaacaaggttcaggataacgataaaaaggatcaaatgttcttgttgggcggtgattacatgttcagcgaggcagaaaaactttatccgacgaaggcactgttggatgaagtgtcctacgaggtgctagttcaaaagcttagggagcgtttagacagaaccgattctgtattgcttcagcggtaccattttagttcgaaattacaacaggccggtgagtcggcaagcacttttattttttcccttaaactacaagctgagcattgcgagtttggggaccagaagaacaggttgatttcggaccgtcttctggttggtttgtcagatactaagctaaagcatcgcctcctcactgaggacagtgccaagttaacgctagaacaggcggaaaagatcattgcgacatgggaaatggcggcgacccatacaaaagccttggcaaacaatgaggatgttggcttggtaggttttttgaatgcaaggtaccctctaactggaggcagaggagcagtgattcaacgattcagggaagcagcccagggtttccgtggtccggtgaaaagtcggcttggtgtgcgaccggaaattcgaccagcggaggatcgtaagcaagaacgtcagtccaattcacgagttcgattcagatcccaacaatccaaccgccgggatgcttcaatcatggttggaaacgaggcgacgactaccgctcatccaacccaaatccggctcgttaaggacggaagtggttcgggtcagccaagacggtcgatggtagtggtcgataatggtcggtcgatgctgactaccgctgagcccggaggaacggccgtaaacgatgacgatgtccggcaactaccgaatcgaagcagcccgagaacggtcgttcaacccggagagagaatcgtggaagaacccgatgtccggcaaataccggatctgagtgttaacgaagaaagaagaaaaacggttgaaaagttgaggctgcccggttga

SEQ ID NO: 1701 - DNA, 5005 bp, Aedes aegypti
cgatttgtgcacattgataatggttgctaattccaagcacaattcatatcgaatctctatgtaacttagattgttctggttaatcacgaagtaacagtaacgaattgtatggtcatctatgctcatgctcaaaagggtgcatagattgtgtttaatggtcgtataatttaaggtcgcttgaccccgcctgggcaaaatccaagttacgcccatgtagttggccgctactgctcacccgtgtctgactctggccgggtagagcgcgagagcaatgcgctgaaccaaccgtagcgtacctcgcgggtatgccagccagccagtagtgcttgctttcgagagttaaggctagcgaaaggtgacttagtttcctagcgaatgccgagctgccaagtcgtgtccgattctagagagctctcagcgacggtctcggtcttctctttcgccgtccttggcgtcgtcgccatcattaacggttaacagtgtttgatcaagtgcctttcccggtttcaaatacactcacctgaagcacatggggtattcaaattttggtgaaaccgaaaacatctaaatgctcacgtcatccaaagatctcgcgcgaaggtgacggggttctcaggaaaaccccattgaatcagtaataatcgtgagctacgtgtgcattttggcgagcgaagtgaagttcgcaaaaataagtttcaatgacagagaatagtgaattgtggaatgcatttcgattgaatgcatttgtaaccatcatcaatcgtgcaactcatcgaagccgaagtgttccaccccaaaaaagtgccttgtgttgcacctctctccggtagatgcaagattcatgtaatcaacggcgacgctgaagaaaagaagaggaaaataataattgccacgttaaataatttttccgagcgcactgaccgagacgaataagctagaaaataaagtgtgcagtttttcgttagtgtggtgaagagtccaagtaaaagtttgtgcttttcgcgttttcggccatttcccagcggcgaaacttcggggaatgtccaattttcggttgccagctggcggccactagtgtcgatccgggctgttacgttttttggactagtgaaaatgtgccttcggagcgtgtccgatcgaaaccagctgatattggccaattgctgttgcagtgtcggcggcggtgcagtcgagtaatagtgtctctaattcgcccaatcacggtctctcgcggtaatcatctgtgtgtgtctcggagaaatataccgcgagggaaaatccacccaactgtgcgtcctatcctaagcataagtaagccccgtcaaggcctgatagcagaaacagcagcgagcgcaatcattagaaaactccgccaagaagaggaagtgcgggcggcccacaacaatctgttcaaacatttacacaaccatcaaccgcgagcgagcaggtctcgagtcggaagaaaactcgagattgataggagaaaacccggtcccaacatcatctctacgccaagatggatagcgttatgagcgatctgctactgaacccggaggagtggccctccaatccggacgacttcatggacctgttccagttggacacgaacttgctgttcaacgatggttcggccggttcggtcggcggaacggacgacatcacgtccagtttgatcaacaatctgcagaacgggttcaactatggagacctgtgcggaccgctgaacgacggcggaatggccggctcgatcgatcaacaggccatgtcgccgtcttcgtcgctcggttcggaccaggaattccacgggtttcccaacagcaacagcagcggcagcagcagcaacggtttcgaggatgagttcatcagtggctcacctcatgccatgaccggaattgctagaccgagtgtcaagatggaggtggacgaagccatgaacgagtttagcattttcgagcggaatgccgagcaacaggccctctcgtcggccgcatccgacagtggactttcgagcgataatttggactttgacccaaccgttgactacgaagccctcagcccggccatttcgtcccccggaccatcgatcagcgaacgcggaggattgaactctccgcctcgctacgtcaaacaaccgattcaacaacccatccagaagaaacagatcatagtccagcaaccgaccccacaacaaacgcaaacccttgccgtcccggtgaccgccacgccaccctcagctgctacatcgaccctcaccaaaaatggcaaagtgtatcaaacggtcaaaaccgttgttaccagcagtggtcaacagaatcggaagaatcccacgaaggttatcgtcgaaaaggttacaccggaatacgatactggatccggaattatactgagcaaagatcaactgcaaacgactcagctggccaacggaaaggaagtcaaaatctaccgcgttgcttcgctgaagaacggtcaaacggtgaatgtcgcttccggtgccaatgccaacaagaaagtcaccttacagcttaaaaatggatctaccaatgcagttaccaccaaaacaggtggaaccgtttttctcaataacaaaaatgtggttttgacttccgcccctggaaatggccaaacgggagtccgcaaaattattcgcgtccaacagcagcaacagcaaaacggacgttcgattttggtcccggtttcgattcaggatttgcgtacgataaaaattgttaatccagctaatcttaaacctaaatccgccaacattaaactggccgcggcaaatttgctacagcaatcgaaacaaggattgatccaaaagaacgtggtcctctccaaggagcaactgatggttgatgatagcgatgcagcgcaaacttcggacagcgaaagtttcgttttcgaagatatcatgcagcagagcagctcggtaattgaacaggttgagcgccaacagaagcaacagcagcagcaacaactatccagcgattcggatgccgacatggacccggatgacgacttggatggcgacgatgatagcataaccggtgcatcgaaaccgaacgcttccggaggatatcagaagctgatcttgactacggaagagaaacgtttgttggccaaagaaggcatcagtctaccgacgtgttacccactgacgaagcacgaggaacgcgagctgaagcggattcgacgaaagattcgcaacaagatttccgcgcaggattcgcgcaagcggaagaaggaatatgttgacggattggaggaacgagtcaagcaatgcaccgaggagaaccagacgctgctgaagcgtatcaagatccttcagagtcaaaatcatgatctcatgagtcaaatgaaaaagattcaatcgctgctaacgaagggcacgggcaaaactacccaaccggcgacgtgtctgatggtgttgctgctcagcatggccctggtggccgttccgaacctcaagctaggcggttcgcatcagcagcagaacatccaggattcgatcgagatggccgaattgctgcaggaagctgccagcgagaagacacagatcccggcccaggctcaaaatcggcgctcgcttctgttcgataccaaggaacagctcggcgatgcacttgtcgatgaggagatgaatttcgatgagatcatggccttcaacgtgaactccttgattgccagcgagcacgattattcctccgaagaggaacccagggccaagaggtcaaagacacaatccctagtggagtacgacgtcgatgacgaaatctggaatggaagcagcaagatgcgtatcaaaacggaagttaacgagcatgtcaacggactattcaacgagaaggcgaaactattccaggaagcatttgagcaaaagctgaacgaacagagctcgggattcaacataaaatcggaacaaacgagcgaattgatcgttgaccgtgaactgttggatgcaatgtctaagcaaggttctgccgcgttatacgacagcttgaatctcgacaacctaaagaacggtgccggtattgaactgttgaccactaacggagcaacgacaggaaccgttgaagaggtaggtaggaaactgaatgcttctcagcaaattcaacaacaaaataataagagaaaactcttactttaaactggaaaacagacgttagcattctatctatatgttaattctttttcattgggctgttatttctatgtgtacataagttctactacgttaaggatctaaaatatatattattgaagaagtttagagggctctagactatatttctacacacagtgtaatctaattgtgagctggcatttgtgctattgatcgtttattagggtaacgtcaaatgatacaaacattacaatttagtattgaaacgtagtggtataagttttgaatttttccacctgttttcgaaatagagaaaatacatatatgttatcttttccttgttgttagttccagactttatatatttttcatcaaaatcaactattgtgcaattcgattttatttccatactgtaactattaattgtagcttctagctagatctagttgctggaaaaatatgatatctttatttgaataaattgtttaataacactaatctaagacctgcagcagagttctgaatgcatggaaaattttcttcaccctagacagtttgagcaactaagttaaattcataagcagcatctttctcataaagaccaaataacatcgaactggtggaaaagcaaattgattcctagcgcacgcagatttcgtttccaatcccttcgtatgagacaaaaatagacttaacaaattaccactcataaaacaaatttcctatagataaacaaattggatattttgctacttgcaagggggtgaagtttcaccccgcaacaagtatgcaggggaaaaaacagtaaattttaaaaccgaacagatgtaatgttatcgtacaccacacactaccatttaatatatattgctgtatataaacagt

SEQ ID NO: 1702 - DNA, 645 bp, Aedes aegypti
gtccgcgttctaattttcttctggagccttgccgtcgcgaaaaattgccggaaagcgactaagtttagtgcgaaagtgtacgcgagtgatcacgattcacgaagcgcaggacagaagcattctgagcgacacggtcgctccaccggctacagatgattcctctcccgcacctccggatagtgctaaggaagtgcagaagatgcactctttctatcaggtgttgcgtcaacggatttgcccgtacggaggtagtttgtatgctattcagaagctggattatgtggcccatgaagacatcttgccgtatagttccggcgaacagcagcactgcagcttgagttcgattggtttgtaggctgccggcatagctgaagaaatcaccgaaggcggtcacccgtatgcctacatgggatatcacgagaagccagctgctttggtgcattggatcggcacgagaaacttgatcgagctccgcggtttatttcactgtgtactgagggatgcttatcactaccggaagtgctttcaggcttgtattttttggctctgcccactgagagtccttggactacaccacctgaagcgtctcagccgttatcctgtatcatttagaatattattaatgcaataaaaattgtaataaat

SEQ ID NO: 1703 - DNA, 3668 bp, Aedes aegypti
gatcgctgtagaagtggccggttcgtccggtatggggcgtcgtaacaacgatcgagacgaatacgccggatatggagtggaaacgttcgtgcgggaatcgcatcccactgaaacgacatccttgctgacgagcgccaaggcatggggtcgcgatcatatctacagtgggttcgaaaaaatgaagatattaggtgccgtatcgccgatcaaggttcccccgtctgcagctacgccatttatcagcttttcgtcgaatgtgaacagaaagaaatccgatgccggtattggaagttcatctccagcagccggttgcagcaagcagcgtacccgggagggaccccactgtgaacagtttctcaagaaaattggagtgatcaaggtggaccccaatgacgaagcggagcacagctgcagctaccgcaacgaattttgtcttcgttggcaggcgtattttaaacagctctcgtcaattcttacttgtggtgaagcaatctgtatagaagtgtatcttggaccggaaaatcatgccattctactggaacaatggattttgaagcttaaattgaaaacatctgaatcaacgatgaccctacaatcgctctgtgctgccatccgtagtcaattatatttttcgcagatatccgcctggactgatttgataaagaattcgctcgaaccggaaattttcaacaatccacgtatcaaaaaagtgtccgtcgatgaactgggagcatcggtcagtgcaccgatcccaatcagcagtagcagcagtagtagcagtagcgggagccacaatggaggaggtacctcgccgttggttttgccgaaagcgaaactggacatcctgtttcgcatccgcggttacgacaacactgcctgctttaacgatagtcccaatgtgcacaatttcccggatgccatcatagcagaaaattatgtcatagaagtatgcttgaagagcttaccgcgcctggaacggataccgagcatcaacgatgaaatggatatgaaaatggatgaaagcttagtaaatgatcgaatggatttgccgtgtcacgagaaggggaagcacaggtgtgctttccgggacgaggacgaggaagatccccaaacgggagaagacgatatgtctcctgctgcggttagtcatcgagagaaacagctgatgaagtacaagaaacgtatgatgaagcgcgagaagaagaaaaagtcctctgcaccggaagtgacttcaacggccagcaatggcagtagcagtagtcatgttgaagcggtgcctatgatggttaccccacctgtgtgtaaatcaccggccctgaatatcccagctgtgaatcatcacgccagcaactgcagcagctcctcgccgtatacctcgtcgatcaatctgattcaacctccactgtactcgaattgcgatgatctgtaccaaccagccttgtgcgccagcaacaacacgaaagcaactcagactgccatcttcctcagcagcatgtccaacagcggtaacaacgttgcaacagtggccacccagacggatgcgagtgggtgttgctgtctttgtgccgaacagcaaccggagtcggaccctggtcttcggaaggccgagctgctcctgcaggccattcaaaggacagccatcattaatgaccaccagcaaccggatgtggcacatttcagtaacaataattactatagtggcagttacaatgataataacaatactggtagtgatacagcaaagtgtgactgtcgtttgtgcaaacgacaaaaaacgaagcataattttaagttagctctcaacaaccggccgacgaatttttccaccgactcttcttctccctgcttcatgcttctgaacacgtacctgcgtccagcagtcgaattgcttctctatacacgtcagacccaggaggggatcatgttcgcccaaccgtcaccggttgaccatctggggcgccgtccttccccgtttaccgcaccgaacgttaatcggatgcagacatctacacctgccagcagtacaagcaagcttcctctctacgtcagctgtacggacagcgattactccgttagcacggccagcagcatatcaccgcataagaaacagatactcagctgcaccgcagtggccggcaactcgcgccccggcagtaaaccgtcgtcgtcgtcttcctcgaattttaccatcccaaaaattaaccttaccaatgttttcaacgtgtcacccttggctcgggaggattccggcttcgtcagcagttccagcccgattcccatcgatgggagtgtgttcaactttccggattccacgcaccgattgaacgtacaaaaatccaactctgctcccacatgccaactatcaccgggatcattgtcgccaagattcctgcgtcacgcttacaaaaaccaacgtacacgctatctatcggaacgcagctctgtttccgaacgttcgtccatagggtccgatgaacaattctccgacgaagacaaactgcccagttcaccgttgaagctcaaccttgcgcaacgcccgttcagcaaacctttcagcaaaaacctgttcaaatttgggcgtctgccacttctggggacgctcgaggagtcactatttcagcgccgaatcgatccaaagttccaggtggcggacttcaaggtgctgctcggcgcttcggggagcttctgcccaacgcagctaaccataccggtggcttcgtatttctacgaactaccgggccagcatctcaccacaccctatgtgtgtgaactacgtcttccaaggaaaggttactccatcccaaggcaaggaacggtccaggttacgttgctcaacccactgggtactgtagtgcgcatgttcgtggtaccgtacgatttccgggatatgcccgccatgtccatgacgttcatccggcagcgaatcctggcgtacgacgataccagcaagggaacgatcggaaatgctaccggcgtcgagcagctcagcaatgccgaacagatgaagctactgcgatatgcgatccacttgagatttcaaacgtctcgctccggaaagctctcgctgcataccgacatccggttgttgatctcccgtcgcaccgactgtgatacggccgcggcccacgccaagaacctcctggaggcaccaaacgagctcaaggtggtcaccattgtaccggagaatcccaaatttagcctacgagtggataagcagtaagcacacgtgatatgtagatggtagtgaaccgatcctcattctaatccgcctctcgtgtccgtcagtcgtcagtccagttacctacgaggtagttctattttaaaccgtttatttaacccgttgcgtccgtgttgttccccgaaatgtttcttttatagattctaaccgttcacatttttttgtattggaaatgatcacgttttcaaatttttaatctgttctctcgatggcactgtgattacttcgcttctaattttactgatatttttttcggagagagaccttcgttgcttgctatagggtagaatgtgaaatgcgaatttgggcgccagcaacgaagcatctgtacacgtgaaaatttatattttatcgagttgatctatattttaaaaataatcatttgttgtgaattcttctgttggtatagaatatagaaatttgaagtagt

SEQ ID NO: 1704 - DNA, 1042 bp, Aedes aegypti
atgactgaaaccgccgtcgaagttgccgccgtggctccagcagtaaaagcgcctaagaagatcaaagtcgctgagaaagacgctaacaagctgaagaagcaaccgactcatccaccagtgaacgaaatggtcattgccgctctcagcaacttaaaggaacgtaaaggatcttctctgcaggctgttaaaaagtacatcggtgccaattacgattgcgacgtgatcaggttgtacaccttcatccgaagggctctgaaaactggcgtcgagaagggaactctaatccagaccaagggaaccggtgcgactggatccttcaagctggtggacaagaagaaggcgtccgttgagaaaaagcctaaaaaggctgtcagtgagaagaaggaggctgtcaaaaaagctgcgggcgataagaaggtcaagaaactggccaccaagaaagcgacgggtgtgaagaaagccaaagctgtgaagactggcactgcgaagaaggctgctccttccaagcagaagtctaccaaaccatcgaaggccgctgctgccacgaagccaaaaaccccgaagccgaagaaaatcgctccggccaaaaaagccgcctcgaagaaagtcgccgctaaaaatcatttgaaaatggcaccgaaaacaagtgaaaaagctgcgaaaaagtccggcaaggctcagaagagcgtcgttaagggagataagaaaaagaaggtacgccgcaaggaaagctacgccatctatatttacaaggtgctgaaacaggtccacccggacaccggagtttcatcgaaggccatgagcatcatgaacagcttcgtcaacgacatcttcgagcggatcgctgctgaggcttcccgtttggctcattacaacaagcgttcgacgataacgtctcgtgaaattcaaaccgctgttcgtttgctgttgccgggagaattggccaagcatgccgtctccgagggtaccaaggccgtcaccaagtacaccagctcaaagtaaatccaccccttcgaatatcggacaacatctatcaaaacaa

SEQ ID NO: 1705 - DNA, 2025 bp, Aedes aegypti
aaagttaaatactggtggtagcttaaatttattaaaaactgacaccacagcgaaatgtttgcctataattgttaaaaagttaaatatctcgtgaattttaaatgcttcataagtgttttttacatgttgagcatatcgtgacatcattctcacagctggacacgctcactaatactacgattaaataagttgcttacctgtttctagtaaaaatgatgccagttctggtctgtcacttccagttcacaacaaacgctttcgctatttaacgcaagtaaataacactaattcaaaatagatacaccaacataaacctaccattaaacagagctcggatgctgaaataaagctatggctctgctagaaataagcaaacaaccgtgccgtatctgcttcgatacagccgaaaatacggttccgttaagttggaacgagaccgggaaaagtttagcggaaatgttaggcaaatgtgtactactggagtttcacgaaaatgacggtcttccttttcaatgctgtgtaagttgcaaagatgatttgatcattgcttataaactgctggagcgatgtaggcaatccgatgcaaaattccgactccagctactggagagcaaaacggtggtgagggagactacttgcccgataactgcagaattctttgatacgaaacatgaaccagcaatcgaaatcgactatccagatccattcaagaaagaaaatagtgatagttctgcggaagaggacatcgatgacaaggatgacaccaattttgtgccttacagtgagggcgatgatgaagacgatggcaatgaagaggacaaagaaagtgatcaaaaaggtgatataatagaaaacgataaatctccagaaactggaactggcatcgatattgatgataatgatccatcggaacgcaaacgaagaaagtacgttaaacggaaattcgtatcaattcctaaaaggtgctgcaagtgtaagattcgttttgaagaccttgaacaagcgaaacaacacgtaaatgtgcatttggattcgaaacaaaccgatcctcaaaagatatctgctcgtccatatgagtgcagtgcttgcttcaaacgatatacgaaaaagcgagctttactatttcaccagcgagaaatgtacgtagataagccctttgtatgcgatgaatgtgatcaggactttatatcggaggatcaactgaccagtcacaaagaactccatagcaaggaggcagatgaacgaaataaacaattacccaaatgctgtgcttgctatgaacagttcgaatcggaagaaagtcttaaaacgcattgccaggaagtccactggccagaaagccaacccatcgatcccccaaatgccaccgattttccctgtccaatttgctaccgtcgttataaaacgcgacgttcactgttgaaccataagttgaagccctaccgaaccaagcagtatcagtgctctcaatgtggaagaatctttcgcgataaatgcgccctttcggaccacgagcgctgtcatcaaggcgaacgcccctttgtatgcccaatatgttcaaaaccgtttgcaattaaggattcctaccgcaagcacgtaaaatcacacgcaatcgaagacgaccattacaagtgtgaaacttgcggcaaaggtttcaagaccaagggcaacctcaaagatcactacattacgcacgtgacggactaccgtccactggcgtgcagcctctgttcggccacatttgcgcgaaagtcctgcctcaaatcgcatatgcgaatgcacaccggagaaaagcccttcaaatgccacctgtgtgatgcgagttatgcgttttccagtgatttgaagcggcacattatggcccacaccggaaccaagccgtacgtttgcaatgtatgtgggaggggctatccacgacaggattatctgcggaagcatttggcggcacacaactatagcagtgcgaccaacagctagttttgtttcacttgtatactttcgaataaaactttttttaaattctaa

SEQ ID NO: 1706 - DNA, 979 bp, Aedes aegypti
gaatcgtttgataaaataatttgtatgagtattgtagatattttattaataatcgtaaaattaaaccatgccgtcaacacaagatttgtgcgaaaagttctacggaacgcgtgatatctacgaaatcttcgaagtcaccaagaatgctcaggaaagcgaaattaaaaaggcttattataaactatctctaaaagtacacccggaccgtgtcaagcaggacgaaaaaacggaagccaccgagaagttcaaagttttgagcaagatctactccattctttccgatcgggaaaaacgtgctttgtatgacgagcagggcataatcgaagatgaggacgattcctccgggaccaagtggatggccatgtggcaaaagttcttcaaacccatttccaccgacgacatcgatgacttcgagaaggtatatgtcggttcggatctggagcggaacgatataaaggaggcttatctgaagggcaagggatgcatagattatatgtcccaatgtgttccctatatgggcgtcaaagatgagccaaggatagccgagatagtgcagtcgatgattgcttcgggcgaagttcccgagtatgcggccttcaatgatgaaccccaggagaagcgtgctcggcgccacaagaaggaggcaaaggaggccaaggaagcagaagcgctgaagaagacgctgggcaaaaagaaggctgccaagcaagtgtcccttgagcagcaaattgccgaacgtcggacggaacgcgaacaaggcttcaattccctgctggatcggttggcagcaaaatatggtcaagaggatgaagatgactgaaggatctatcgagctaagcgattataaaccgaagactgagaagaaacggagtattaatgttccttaattttatgttttacgtgcgttactattgttttaaatacctaatcgattaactgtaatacatgtacctatggtaaaataattttgtttataaag

SEQ ID NO: 1707 - DNA, 972 bp, Aedes aegypti
atggcctatgtagtggctcccaatattgaacccttccgcaagggtcaaacttttgcaacttggatccgtcgtttaacctatcatttccgtgtgaacaaggttcaggataacgataaaaaggatcaaatgttcttgttgggcggtgattacctgttcagcgaggcagaaaaactttatccgacggaggcactgttggatgaagtgtcctatgaggtgctagttcaaaagcttagggagcgtttagacagaaccgattctgtattgcttcaacggtaccattttagttcgaaattacaacaggccggtgagtcggcaagcgattttattttttcccttaaactacaagctgagcattgcgagtttggggaccagaagaacaggttgattttggaccgtcttctggttggtttgtcagatactaagctaaaacatcgcctcctcactgaggacagtgcaaagttaacgctagaacaggcggaaaagatcattgcgacatgggaaatggcggcgacccatacaaaagccttggcaaacaatgaggatgttggcttgatcatggttggaaacgaggcgacgactaccgctcatccaacccaaatccggctcgttaaggacggaagtggttcgggtcagccaagacggtcgatggtagtggtcgataatggtcggtcgatgctgactaccgctgagcccggaggaacggccgtaaacgatgacgatgtccggcaactaccggatcgaagcagcccgagaacggtcgctcaacccggaaagagaatcgtggaggaacccgatgtccggcaaataccggatctgagtgttaacgaagaaagaagaaaaagtgatcaaataatagatagaagaaatagaaaaagaaaatcactgtcggatatggtagagctcactggcctaccccggcgttctaaaagaattagaaatattaagcatgatgatgaattcgaatattattaa

SEQ ID NO: 1708 - DNA, 3174 bp, Aedes aegypti
atgctcgatgctgatgatgatcttggagggaatttgattggaatcctacccaaccttcagaacatggacctgctgaagcacaacgattggatcaacttttccgagtacgagtacagcgacagcctgattccgaagacatcgcaagcggtggtcgacatccagcagttcgcaaacaacaacctgaaccgtacgattgagaatggcgtcttccagaacccacgtgcagctgccctgaaggcccgtcgtaactccatgagtgacaacctgtacgctccctcttctatcagcgggtacgaaatggtggacaaactaaaaccttcgaccttcaccatcctgggtcatggtgtgacggatccccggttgtacgatggatcgtcaatgtacttgggcggatcggacattaccaattcggcggaagccatgagtgagtacgaacggatgttgcggtatcacaagctcgatgcaacgaaacctattctcacggataagatcacaaccgggtccaattttagagttcccgaaggacgccaacacaagaagcctgcctttacaatcatcaacgaaagcctgcccaaatcgaactcgttcgacacctccacgggaccgttcctgccttactcagccaaacaacagctgcctacgaccagaatcctatctgccagctctgttggacatagtgccttcctcaatacccgcggccgtcagttgagcatgacgtccgacgatccgtttctagcgtaccaacgtcgattcagtaacgcttcacaggtttcacctacgtccacagggaaacgtcgaaagtccgtttcgaagaaaagcgccggtcacggcaaaaagtccaaaagtaaaaccgccaccgctaacgtaccgaatcccaaccgaaagcagagaggagtgctaggtatattcaaccgagcgactccttcacctaccaaacaaccgaaccatgtcaaaagtgccaaactagaagttatcgcagcttccgatgacggacaatcgtcaaccacgccgactgaaacgaccgatatgatcgaaatccccgagcatcagctacgaaacttgaagatgttctcctacaaaccatttgctttacggccgacgctctctcctgtgcaagacaagagttctatggaaaactcgcaaatcgacttgaaggatacttcgccagccaaagagaagggtggatatttacgaaccccagtgttcaacatccgtggtttgctgtctcctgggaagttcaaaagcaaaggtgaatcacccactagacccgaaaagacaggtctgtcatctgtgggtgcagcaatgaatgcagccatggctgccgcagctgtaggagacgttaagcgagcggatagcaaagaacgtcaagaaccaccgaagcgaaggggattcaatctagccagagccatcattgactatggcaagaaatccgatcaagaagaggagaaaaaggcaaaaccagaacctccgaaaccgaaaccggaagttaagcgggacggacggcggaaagattcggaaggcaatcgtgtgaaagacaagaaggaaagtccaaagaaggcgactcccaagaagaaagcgaagacgaaaaccacggcgaagaaaggcggcgccaaagacgattacgatgattactactacgaggaagacgaaaaaccaaagcgtgggatgttgagaggggcgttgaacctagcgtcgagcttgagaggtggcagtaagaaaggaacgacgaaagaacccccaaaagccagtcgggtagcgagtgcaaaacgaggaggccagaaaagtgcaacgatgggtgcaggaagtagggcatccgcaggagtcaagagtggtaaagcaaacgaaagaactagccagcgtgctggagataatagtgggaaggcgatgcccaaggcaactccaaaatcggcatctggtcccaagggaaaaccgttgaggcgaagcagttcgactagcgccctgaatgtagatagcgttaagaaattgaatcgattgtacgagaagaatgcaaaggcgggcgatcgcaacgggaaaatgctgaagggagacaagaaaacccgacaatcatccgacagtctgctgaagaagtctgacagtagaggagaactgaaacaaaagactggaatcaaatcggctacggagaaggaaatcgtgaaacgggactcggaaaagtccttgaagaagagtgatagcaacaaatccatactaaaattgggcaagaagagtgactcgaaggggtccctgcacggcaaacgatccgattcgaagaccagtctccatcagactgaagcaatggcatcgatggcagcaggctcggtagcggcggccatggagtttgcaggtaacagcggagggcccaaatcggatgcagagtcgctgaaagctgctctgaatacgttgaatgaggcgaccgctgatagcggaatgagatccaccaaggttacgcccactccccataggaagctgcaaagtaaaggatccttgttaagtttactaagcatgaaaagcactacccgtaaagcgcacgatgtcgaggctggaatgggagattccggaggaaaggattcacgtcccggtacggcacaaacaggtgtaggccggttgaagtcagcatccgtgagaaacatgtccgcgaaaccgggtactcctaccggaacagaaggggagtttggatcgcaaggcagcattcgagagaagccaggcagtaccaaacctcagcggaggggtatgctgagtaaaaccaatagttcaatttcaatgaagagcatcgtccatgctcgatcgtttatcaacattcggccatcgtcgaagaccgatgatatgaagaagatcgattcgatgcctcagatgagcaaagtgcaggaaggatcccaagagcaagacgatgccgacgaaggattgaccatggcaatgagaggaggaggaggaggaggaaccatgacgacggcctcagcaacgcatacgatgacagtggccggagtgggagagggtgagaaagtttccaacgagtacaacgaacagcgagctaaaggacaatcgccggaaacgggtgccggacagggcggcggcagttcgaagatgatgggaaatgaatcaagtgccaacaccgactcgatgatgatgcagcgacatcagggcgaggaggataacagaacactgttcctggctatttaa

SEQ ID NO: 1709 - DNA, 1200 bp, Aedes aegypti
gatctgtgcatttctaggaaacgaactatggtccagtttctcatcagtggctggggcggtcacaacggaacagcaactcctgacacccgccgaggtggccatcgaaaccagcttcgggcagatcattgccacgccaggtgccatcaccgatccaacgcacatctggaaccggctgcagcgggatcttcaatgctgcgggattaacaatgtccacgattacaagaaggagaaacagaagcagctgggtcttccgtggtcctgctacaatccggtcgacagcaagatctacgaggtcggatgcgcacatgttctggtgaaaaacgtcgagatggacatcgtcaaagtagccatcgttgcgatatcgtccgcgttaatacagagtctcggcatcttctgcgtgatccagctggtgatgctcctgaaacggcccaaactgaccctccccaacggcaacagccactcgctgcggatcaagcgaccgcgtgaaatggcaccactggccaccagcacgatcgcttccacatccagcggcatgacgtcgcacacgatgaccgtctcgtcgttgggcccaactgctccaaccgctcatagcagtgccagcagcaccatgctgaagcctccgatcgcacagaaaccgattgtgcccaaaattgaacacccgatcatcaaatagcagtacgccaccccagggggatgtattctttgagttgcatttttgaacgatttttactttctcgtttccggtaggtagactgtgcgaatgtgtaaagttattgtaggattaaatagaaggggggcgtaagtgactttcgaatgctcctcggaggactcatcgcttagacatttagatttaggagacacaaaaaatccagccatctcgtccattattgatgtacttagaaacgcgttgataacgttttccgattttaatgataaacgagagtacttatcgctgctacgtttgcgttgatgtagaagtgtagtttgtaaggttcatcgatttagccgttatctatttttttccaccacgcttatatccgacttgcgacagtgaagtatttctacgattacctaccgctatacagagaaaaaaaatgttctgagcagaattgctcgattccgaatatgacaggacgaaggcatgcataagtatgttttagtggatcaggaaatatttttaataaaattcaataatgattt

SEQ ID NO: 1710 - DNA, 3453 bp, Aedes aegypti
gttgtccgcgacatgtcctcgatgccgagcaccgctccaaccagtgccgatgcctgtctcagcattgtccattcgctgatgtgtcaccggcaaggtggggaaagcgaaggcttcgccaaacgggccatcgaatctctggtgaagaagctgaaggagaaacgagacgagctggactcactaatcacggccatcaccacaaacggagcgcaccccagcaagtgcgtcacgatccaacggaccctcgatggtcgattgcaggtggcagggcgcaaaggtttccctcatgtgatttatgcccgcatatggcgctggccagatctccacaaaaacgaactgaagcacgtcaagtactgtcagttcgcgttcgatctcaaatgcgactcggtttgcgtcaacccgtaccattatgagcgggtggtgtcccccggaattgatctatcaggattaacactgcagactgggccgagtcgtttaatcaaagatgagtacaccccgggttcggttgtgccgggatcaatggacattgatggcaatgaaattggaacgatacaacaccacccggcaatggtgccaggggcgggctacggtggcatgggaatgcaccaacaaagattaagcttttccattttgttgtttcacgtatcttgtgttaatattggccctttacacccgtcacaattgggcagtatgtttcctcctccgccgggcacctctgttctaggcaatccaatcgagttagccagcggcggtgggttgcgccctcctcagccgggacccgcacaggggcctcctcaatccgctccaccaaatcctcaaatgacaaacggtggtaacggacttataggaagctcatcacagcccaatctccttggtgcggacggtcaaggccaatactacaccaatagcaccgtggatcccacgcttgctggtgatcctcaacttggtcccaacatgggagtacaaaattcgatatctgccacatcgcccgtatctcctcacctgcagcagaatggttacagtcagcagccaccaaacagtcaacagcaacaacaagcaccacctcagcagcagtcacaacaatcctccggtcagggacagtacggccaacaccagaccggtgcggcgacatggtccggtgccaacacgctaacgtatacgcaatcaattcagccgccagcgccggatccacggtctcagggtggtcaccagcagtactggcagcatggcggcggtggccctggaagtgtcagtggatcaagtacaggccaaatgcaggaattgccaaaccaacaacgtctgtctagacaaccggcaccggaatactggtgttcggttgcttatttcgagctcgatacccaggttggggaaatgttcaaagtaccatcgaaccgtccaaatgtaaccgtcgacgggtatgtcgatccgtctggtggaaatcggttctgcttgggtgcactcagcaacgtgcatcgaacggagcaaagtgaaaaagcaaggctacacatcggcaagggagtgcagctggatctgcgtggcgaaggagatgtgtggctgcgatgcctaagtgaccattcagtgttcgtacaaagttactatctggatcgggaggctggccgcacgccaggcgatgcggttcacaaaatctatcctgcggcatgcataaaggtgtttgatctccgccagtgtcaccttcagatgcaatctttggcaacgagcgcccagaaagctgcacaaatgcaagccgccgcggtagctggggtttctggattagctgttggtgctccccgaaatctgtcggccgctgctggaatcggtgtcgatgacttgcgaaggctctgtatcctccggctgtccttcgtcaagggctggggccccgactatcctagacagtcaatcaaagagacgccctgctgggtagaagtacacctgcaccgggcgttgcaactgttggacgaagtgttgcatcaaatgccgattgatggcccccgcggcggtatagagtaaatcacaacgcgtatagctgcttcagtatatgtataggatatttatttcacgcgtgacggatctacaattattgtttatagtgatatgctgatatgtacatgtacgagtagtgatcacaagagtgttacaagagtgcgcatgcaaatgcttgttaaaatataagacgtactatccgttcgagacgtttagtgcaaaaagttactcagtagattgcttcaaaatccctatttgtgcattgaaactgtgtaggcaatttttgctaaaattatgttaatgttgttcttctaaacacctgacgttggaatagagagacaggacagaattcagtaatcacagcaagtcgtctgtaacggatagcgaaaacaggaaataaaaaacgtgtgatttgttagtagataacgtttatgataagcatgaaaacatgtatacttagcaactaaatcatgaataaacttatttatacagataacgatctacaaagttttatgctaaatattagaagaaaaaaaaaacaaagaatgtttacgcatcaaagtgattcaaacaagtaccgcaaggtcaatacacaaatttcgtctcttacaaaataaatgattatataaaacgatgaaaacattaacaactgaactaaaaggatacaaagcaaccgacaaatattctacctctgaaaaaaaatgagaacaacaagaacactcactttatattcatgcatagttctttaaacaaagatacctaaatagcagacaaaaggcgaacaaaattaagatgtgctagcaaataatacaaataaaagaacacacaaatggcaaagcgccccctaaagttgattacagtgaggttatggacatgcgtcaaacagcgttggatgtttcaaaaatgttagtagtgacaaaactgaaaggaatctgtaccttaaaaattaataagaaaacatgctctttccagaggacgaatcccggctatattattactattggtgatttcagcatgaagcaaagcgtgctaatcaagccgtacagtatcggtgcgcattgatagtgccattaaagagagctggtttgtgaaatcaggtataaagaaactattttcaatcattactacactttgactatttcgaaaagaaacttaatttatgtcttgatttgttagttctttttttcgtttcaaagacaattgaaataaaacaatcgtgaaaagtgcaatgaaggagcattattaaaactgaatgaggaaaaaaaatcacacgcatagtacgaacgttgttcgacaaagagttacttccaaaatcggagaagtttattttgttagttgctgattggaatgccccactgttgatgtttttttttttctattttttttagaaccatatttgaaatggttcgcaatctaaatatgacagaatgtaactttaaatcaagattatcggtaaataaaaatacatcacatcgc

SEQ ID NO: 1711 - DNA, 1218 bp, Aedes aegypti
atgactacacatcgtgactttgcgcgtatgaaaagtcacgagcgaggtgaggaggacgaggaagaagacgatgactcggataccctgacggagctttccttctcacggtccaccagtagtctgggccggagtagtaccgggtcaattccgtgggcagaggacgctgtgaagcagaatcagttggaatgggaacgaatcgagcggatgttttacggagaggaggatctgcccagcgatagcaagctgcgcgaggagttgctcgagtggatgaccgcctttccgcacctgagagtgctcggaagagctgtaacgattgaggaaagcccgactgcaaaaggctcggatccattccatgaggaagtattcgcagcggatccaccccggatgagtcgaatccgatcgtccaggagtggcaagaatgctaagcaatttaaagagagtgaacttcagcttgttcctaacgatatcgagcgatatcttcatatcagttctggtcaaattatgcgaaacaatcatagaaatgccaaagagttagttaagaatactagcgatccccttatttcgttcgtagaaacggtggaaacaccgccaaagcaaaaagcttctaataatttaatcataccctcatcgaatcaatcatttggaatactaattagcaacaactacaactacttaacgggcaacgatttgtcctgcagtcggaacagtagcgcacaatcagttacacgcttcaacaatagtattatgcatagaaggttggcaccactgggtcaaagaccgcagccgaaagcatccctatcgctggaaaagccaattctctcctcttcggcgtcggcaaccaacacaaggataccgcctttgggcacgaacatcaaattcatcgtccggaacaccggagttccgggaaccatcggctcggacatcgaccagcgccatgccaagttcaacatgatcaaatcggcaacctcctcgcggtatccgctatcgccgacgaaaaacgtcatcacgctcccgtcgctatcggttctggacactccggaaagaaccgggacaatcccacgaggctcgaggaagactgctttcaacacgcaaatcgttgggcgatccatttcggcagcggtgacgcagaagaactcgtcctacaaagcgaacagcggaagtggcggaggcaacggaaatgctggggcgcctaagctgaatatcatccactttcactga

SEQ ID NO: 1712 - DNA, 3355 bp, Aedes aegypti
ggaacgtcaagtttgcgcgctcaaaacatcctcatcgcagagagaagtggaggcgtgaaagagtccgtcgatggtttaaaaattttggtgcaattttaaaaattgaaatcattgtagaaagtgtccaaactcctcgcaaacatgaagtgccagatcccggaaatatcgtggcacaatcgcgatccggttctgagtgtggacattcaaccgcgaacgagcggcgataagggcgacttctaccggttggcttcgggcggaaccgactctcatgttttgatttggtacatgactcagaatgccgaatgcggaacgatttcgctggatgtggtggccgatttggctcgccatcaacgggcagtgaatgccgtccggtggtccccaaatggggaactgctggcctccggcgacgacgagagtgtcattttcatctggaagcagaaaagcgattccgaggtgatcaacattttggacgcgaccaacgaccaggataaggaaatttggttgacattgaagattctacgaggacacatggaagatgtgtacgacttgtcatggtcgcccaattctatgttcttgaccagcggatctgtcgacaatacggccatggtttgggacatcaacaaaggaaaatcaatgcacatctattcggaccataaaggatttgtgcaaggagttgcatgggatcccaagaaccagtatttggctaccctgagcacggatcgatacttccgagtgtttgacctgcaaacgaagaaggtgttgacccggaacaacaaatgtgtgcttccggttccgaaggattctcccctgcatggtaaaacggtgcgtctgtaccacgacgacacattgcagacattcttccgccggttgagttttagtccggatggaaacctcatagttactccttcgggcgtggctgagattgagggtattccaaaacctctgaatactacgtacatctacacgaggaattctttgaagcagcctgccattacattgccctcgccggatcagtacaccgttgctgttcgattctgcccacagtacttcaaattgcgtcctcatccggaaaacaagccaccaatcattccgttgccataccggatgattttcgcagttgccactaaaagttccgtatacctgtatgacacccagcagaaaaccccatttgcactgatttccaacattcactacacgcgtctaacagacatttcctggtccggtgacggaaagatcctgattgtttcatcaacggatggtttttgttcgatgatatccttcactgatggtgaactgggtgagctccacgttttggaagttgacgagtcagcgggtctggaaaaagagaaaactccaacgaaaaaagctacatcgaatcgaaagaagtcaaaggatgggaaagatgatgagaaaaaagaagttaagaagatggaaacggtcccggaagagtcgaaaaaagaggagaaaagagaggaaacgaaagagcctaaaaaaagcgaaacagttgctcaaccaattgccttcagaaggaaacccaaggaacctgaagcagaagaaccgaagaaagaagagaaagtcgctcaaccgattgccttccgaaggaaaccgaaagaacctgaagcaaacagcgaaacgaagccagaaccgaaggagccagctaagccaactcctatcgagattaggcgcaagccacgtgaggaagataagccagctcaaccgattgctgtaaagcgtaaacctaaagattcctcagaagactccaaggctgagcccgacacccaaagcgacgaatctcgaaaacgtcctcgttccaacagctctgaaaaagagcagccttctgaggaagccaatcctgtggcggtgcgtttggtctcgttggagacgaccgatcccaaagcaggaatcgttattaaggaaattccccctgccaacaccacaacggacgaaaagattgtccaaccagctaaagaaatcataatcgaaacggaaaagatcatcagcagtgacgaaaagttcgacagtccttcgaggaagaatcgtcccgtgacgcctatcgctgtgaggcgacatccccgcactccggacgtaactccgtcttcgtctgaaaacgatcgtgatgccacgccaaaaaccggcaacaaaaattcggccactcccatcgctgttcgccgacagcctcgcaatttatcctcctcaaatgataaatcgacagagtcttccagcaaatcgaagcccactttcgaagaggatgccgtcgatacgtggccaatcgatcaaccgaaaccagtcgtcgccaaaacggtggttcagaacagttccctgggaatcagtgaacagaccgaggacttcaaactggtcatatcggacgacgaagaacaccctcctgcaaccactacggaaaagccgcaatccgatgacgctggtagtgccgccgatagcgattcggacaaggcccctaccgagaaggacaaaacccaatcgactccggttgcgacggccaccacgccgaaaacgcctcgacgggtggagttccggacattgtcgacacctaagtcgaagaagaagttgttgtagagcaaccgattggcggtctttttctgtgctaattgtttaaggttagtttttagggtaaaatataatcgttcgaatggaacactgggtgatcgacgcatccgaaagccttagttgccgtggattataaggattcaaagctgaaaatgattgtgtctttgtcatcgtggtaagtatgaatgaacgagggaagtcccacagccacgaggtgaggagcggatgaccatgggttcgatttgcagttccttcaagaaacacttcattcagtcatcagaagatatcgcacggaggaccgtgcatttgggagcacattcattcgattgaaactgagcagcaggctgtgcgcgtgggcttttgcgttttgaattcgctgccacgttttgtttcgtttccgcgttatttccaaatcggctggtgaaatttagaaaccgctatgctgcccatcttctgtgccatgttctatgtaaaccttatggagcgtgggacaaatatgcgtagaacagcagaatgccacctagcgaatattgtgaacagaaaaattgccttgtgaagtgataatagtggatatagttaaattcgcaatccgcattctgtgacatgctaattagactatctaaatgtttttatagtaaaatcaatcaaaaaagagatttagtgtttgattctttgaatgcgttgcggggcgagtggaaaaaagtcagctgtgttgaatttatcgtgtttatggttaggtgaacataatatgactatgaaattaactacaatacaaactggtaagtgttag

SEQ ID NO: 1713 - DNA, 3094 bp, Aedes aegypti
atggacggctatcacgtacagactcaggacggcagcaacaacacaaacacctattcctatcaccaccatcaacagcagcagtcccagcagcagcatcaccatcatcaccaccaccaacagcagcagcagcagcagcatcatcagcaaaagtacagtcatcagaatcatcacttgcatcggcaccacagcaacaactccaacaacagctacacgacactgaattatgccgcctcggatgcaggcttcgtatcgccaccgccttcgccacgttccaacagttcgctagcttcctgttcgtcttcatcgtactcgtcagcttcctcgtcttcagccgtatcgtcggctgcgtctacatcgtccggactgtcatcggctgggtccgagaatggaacttcatacgaaaatctggacaattcagctcaacggctagcagtgctgtcgttcgagcaggtcaaaaagctgaacgatgtgatgaacgaacccgttgccatccacggtcgtggaaacttcccgaccctggaggtcaagctgaccgatctggtgaacatcgtgcgggagaagttggaggccgacattggatccggtggggccggtatgatcgtgaaggatattcgcctgaatggaggcgccgctagtcacgtgctggcttcagaagcacagccatacaatgatctggatttgatttttgctgtggagtttagctcaaaccgacactttgatcgtgtcaagtctgctgttttgtcgtcgcttttggacctgttaccagagggtgtagtcaggcggaggataacgcagtgttcgctcaaagaagcctacgttggcaagatggtgaaggtgaacaacaacaacgatggtgatcgctggagtctgatctcgctgggcaactccccagggcacaagaacgtcgagctgaagtttgtcgatacgatgcgtcgacagttcgagtttagcgtcgactcgttccagattgtgctggactcgttgctgctgttctacgactgtactgaaaggcccatgatcacggagaatttctacccatccgtcgttggagagtcggtgtacggcgatttccaggaagctctataccatttgcagaagaagctgatatcgacgaggcaaccggaggaaatccggggaggaggactgctcaagtattgcaacttgttggtgagaaactatattccagttgatcaacagaagatcaaaacgctggagcgttacatgtgctcacggttcttcatcgactttccggacattgatcagcagaaaatcaagctggaaagctacttgaggaaccacttttggggtgaggtggaagaacatctacagtaccagtacctgatgcatttatacgatgttgtcgaacagagcacagtatgtcttatgggtcacgagcgtcgtcaaacgctgatgttgatcgaatcgctggccatgcaggtactctaccgtgaccatcctcaaaatccacagacaaccatcattacaaccacgagtacggtaccccagcacaccgcaatgtcgctgcaaccacttcagactcaactctcacaactgagcttacagcctcaacaactctcaccagttcagcagactgtcatccaccaccaccatccgcagggtgtgccacagacgcaaaccctacagctccagcatccgcaggccatcatgcaacagcagtctcctcagcctggacaagctcaaccgcagcagcaaaccatctcgcttgctccacaaccagccggtctactctacgccaacggaatctactacgctccagtcatcccgacgacgctctgcacgtgcaacgccacgtggctgacgacgtgatcggcgcttgcggaacacgataacagcaacaacaacatcaactgtaccaatccggcggcaccactactagtgggatcaatcatcagcgtcaccactacaccgatcgtggccacgttcgaaccgcagtcgcatgcaacgtcaccgtcgacgacgtcatcgtccatctgctgcagtagcaactcctacaacagcaacaacatttacaatgcagacaacagcagcaacaatcgttactttactaatattttagtgtcggatagatgattactagaacagtaagcatgatacacgttttcctctccacagctcaacagattcaaaccatgtaaaccacacagaacactaacacaaattgcgtccgttcaaaatcaactgaaacaaaagatcttttgtattccgaaagagaaacactacgcaaaattgtcaaaccggtgcaaccaaacagtggcgtcagcgctatctataaagtcagagttataaagcaatatttaatcgcaaaaattcaattcaatcgaccttcaaaataaccaccaacccttttcccagtgaatctaaatgtccaaaaactacaccaatttcggaaagaacacgaaaaaaaaatagcgagcgaaccaggaaaacgttgacatcttgtgatagcacacagtgccatctctgtgtgagacgcgtcgagcggaatcaattccaactgaaccaaactatatgaaaagaaaaaaaatgtacaaatatgaggaaacgaaaacaaatatccataaccaccagcataaaaatgcatcttactcgtcatttttgttccttttcccactatgtgtgtcgatgtgagtgtgtgtaaatgtatcgagaatccgatagaagtgcaggaatcaaactcaactatctttgtaatagggacagaaaaggtgttttagacttagtggcgccgagccgagtgacaggggcgtgcgaaaaattactaagcaattttaactaggtgttcagagtttaggccaattaagggacacacattttaacactctgtcaatcgtcatgagaagaggtgagaatctttaggagatttaggggcgaaacaatcgcaacttagttgtccgatccgtgttagttgacgccactgtttgatgttgtacctgctgcgcggttggatggtgtggagaaaagtgaggttacggtctgtatggtttcgataattaataacagtaagcagtcaaagagtgactggatgtatgtttgaaagtaaaatttcgtttaatagaacacggatttgaactgg

SEQ ID NO: 1714 - DNA, 917 bp, Aedes aegypti
gcagcagtttcgtgaaaaaaatgagctcctccgaatcgcattcctccatttccgggacggccaccccatcggcagttagttactcgaatctactcacctcggagtatgagcacaatttggcccaacggatgctatcggaactcctccacacaggtgaagaaactgttgagaaacccatcctgacttttgaggacatttgcgagcgcgtgtcagtcctcaccgaaatgggcatgcggctcgacgatttgatcgaaccgggaatggagtgctataagctgctgaatgataccgccccggagaccgaaaccccggacgagcctatgccgatgaaagcaacggcctccgcttcggatcaggtcgttccggttgtgccaacttccagtacgttgaagcgtaggaagtcgtttgacgattccggattgagaaatacaccgccaaagcagcgtcgaaagaatccgccctcttctttgttggctcgccggcagcatggcagggttcgacgcacactttcggcaccctccctatagtttgatgtgagcttggtgagcgcacgttgattttttttaataatgttattacttttcattttaacgatttacgtgaaatgttttgatacatgactatgacttttactatgtaacattactatttatgatttttactatgtaacattacttttaagcacattcgtaacgttgtatacatgtagagaactaggtacatcacacctagcagtatacatttcgtgatttgcgttgatggatgctctacgaggaacaaaggatgagccgtagcttctgttgcttccttcatttgtacgccccctacagttgaggctactatttttttataaatgtaactatatgacttttactataaaaccttatttttaagcacaatgtagagaaatacataac

SEQ ID NO: 1715 - DNA, 1503 bp, Aedes aegypti
ctagtacacgcttgaatgattcgattctaggcggatgatttggttcagtgcagtgtgagcgcttcatcaagcttttcttttctggaagctcactcttgatatgaactggcgaaagcgcgccaagctcgcatcttgaacggcttcaaaggattcaaaatttgttcatccacttggtccttgccgttgattcggacaacagttgatgcatcatatttcgtggaaaaaaatgagctcctccgaatcgcattcctccatttccgggacggccacctcatcggcagtcagtttctcgaatcagcttaccccggagtatgagcgcagcctggcccagcggatgctacagtacgtgtatgaccggtcagccatcgtcacagcccgccagttggccttctgggagcgcttccgccagcaggcaccggatgtggaaatgtctccgcaagacctccgggcaatgttctacggtgaagtcctgtacgaaccggaacacttcgaagatttggaacacgcggtaaccaattacattaatccccgcttcaaccagatcacgttggaagcgttggaattcggcgatcttgctgaacaagaagactacatgctgaatatgccacggaacgtcccacttccaaacggcgagatgaactttgaacaattggtcaactacatatccaacccgttcgaggcttccaggaactctcggcttgttccgttgaacgtgcaactggtagcagcaccgcaaccgtcggctgacgcaaacttgaagcagcgattctgccatctgctatctgaactcgtctacacaagggatgaaactgttgagaaacctaccctggccattgaggacatttgcgagcgcgtgtcagtcctcaccgccaagggcattcggctcgacgatttgatcgaaccgggaatggagtgctacaagctgctgaacggtatcaatccggagaccgaaaccccgaacgtgcctgtgccggagaaagcaacggtctccgcttcggatcaggtcgttccggttgtgccaacttccagtgcgttgaaacgttggaagtcgttcgacgattctgggctgggaaatacaccgccaaaacagcgtcgaatgaatccgccctcttctttgttagctcggcggcagcatggctgggttcggcgcatactttcggcaccctccaatagtttgatgtgagattgatgagcacgttggatttttaacagtgttattacttctcgttttaacggtttacgtggattgttttaaacccttgatatatgatttaaaccttacttttactttttttgttaagcagcagtataaacttttctatttccgtttatacaatgtacaaaagcagagccgtagcgttgcttccttaatttgtacgtcctctaaagccaaggctaatgttttttttattaaatgtaactatataacttactatgaaaccttaatgttaagcatattgttaacgctgtataattgtagagaaatacatcacatatagcagt

SEQ ID NO: 1716 - DNA, 1257 bp, Aedes aegypti
atgacgtcccaacgtacttatgtaccatccgtttcgcaaccgagatatgaacatgagcccaacagcggccttttattctcacctgacgatctaagcgctctattggccaaaactgaaacaggacaatccatccttcggaatagtttgaaaggcccattatccaaggacagcaaaaaagagctatcgacaatcattgctgatcatcacattttgcgtcatttccacgaaaacaatttatctctatgccgattgccgaaagcagtacttgaaaactacgtgcactgcattaagctacgtttccctgccgaaattgaagatatggtaacatactacattccggctgcaccaccggaaagaaaaaatcccggtggatctatctatcaggcatacaagcgtctaaagggtgcaaaacgtgatcgtgagcggcgcgagcttcagcacgcagctaagctatcaacaaaagaaaaccgcagccctgaacgagccgaacactctgaggccaacagatggctttctctgaataatgcaccatgggacaccgtgctgaaaatgtggaaaactacggaagcatatcgttttgaacaaataaaattactgaagccggttgaaatcattgccaaatttcgacactacgcagaacctctgggatatcaattgattgacgccgactatcactccctcggattttcggaaggcattgcgaattggaccgagctagtgaaaaagttgaaaccgtactttattctcaaagtacatgatgagttttcaatgactgtcctcgaatatatgaatcacgacgatgctacacacgatgtgcttgtatgttgtacgttaattttgctgaattgctgtgtgaagccatgcaaaataaataaaaatgccaggccagcgatccttactgctcaggaggatatcttgatgtttgctgcaaatgtgcaaagtggagtcgacagcattcgcaaattgttcgagtcgtatgcaacccagaacattcctccacacccaaaagtaatcgcgttgggttccagttacagggacatgtctggagagttctacgtcgtatttgatcgccttttatacaaaaccaattctgtagctcgggcggttgacatagttattaagatgtgcaatgttatgaacatcccattttcgaaagttaccaagctcatatggtacactgttgaagaaaccctttacaacattcgtgcacccgctcagtacaaggaaatcgaaataattaaaaagttacaaaaatga

SEQ ID NO: 1717 - DNA, 900 bp, Aedes aegypti
atgaccaattacatcaagtgtttttgtacagggtgtcaacagatgttcactgaagtaaacgaatatatcgcacacctaaaaactcaccgtctggaaaaaccgctccgattagtatgcacatttcaacattgtactcaaaagctcacgaatatgtatagatttagtcgtcatcttaagactcatttaatttgtcgtgaagaaccaatggaatacgacgaaagcaatataaatgatgaacagctcgctgctgctaatgatactgaaacgccaaataccagcttggtatccaataaaacagtagaagcagagaaatcaactacgatacatgagtcgattagaacggtcgagcagaaagcgctcagctttatactcgcgttacacaagaagagaaattttacccgtaaagatgtgatagatattcaaagagaaattaaatcaatgtattctcaactggagcagctcatccgagcatgtgcaccagcagcgagtgatcctcaagcgcagtatacattcgacgttatgttaagtaaaatatcttctttattcgactttatcgatactgaacataagctgtttaaatatttaagagatagagatctgatgagaaagccacaaatgtttataattcaaagaaacggaattatcaatgtcgatgtaaatgatgatgattttgcccagaatagtaaggcttgcttggtattgatggacctagagttccaaattaggaagtttctagaaagcgataatgttcttgaagaaatgaaacaaaacgtaaataccttaatgggaaaaccaaatctgtgtcactatatcaatggttcaacctatcaaaagatttatgctaaatatccagacaggacaataatcccaatatttttctatgcagatgagtttgaaata

SEQ ID NO: 1718 - DNA, 2749 bp, Aedes aegypti
tgtaggaagtcattgagaataattctttcagttccaagttggtgtcgaagtaaaatacaagtcttgctctccgaagatggaagttcaagtgtggctcgggcagaaacgttcttttaccttttattaaatttcaattcaaaatataaaacgttgaattcaaaagctatggtcattccatcactcttgatgaaaataagattttagaacaagtgaagcgaaccatttaattacctacaatccgtcattaccgacgctaggagctccgtttcgactaaaatgcagaaaaaatcaacgaaaacgcacacaaacacacaccaatgaacgcatcgagcgtgcagcaacgtaaacagagagcaaaacacgttcagtttcgctcgttgtttcttcagacttctcttgctctgctagagtcgcggcaaagcctgctacgaatgaaccgtccaggtgacacataaacaagcaaacgtcaaacggggtactttttacttttgaaccgaaattccacgtctcttcaaagcggcgacggaggaagaagtttttcccgaaaattgagaacgttgtttttagctttattttaccttattgcaacatgacacagtgaaggaaacgatgcacaaataaccagcgattcatcagtgattttacgcgagtggatagatagagttaatcgataatataagcttgaggaattgaaaatgactacgaatgctagcagcagggtactgctggcggtgatgatgctggcagggatgctatcatgtgtggcaggtcacggttggggttcggacgacatggaaatcttcgatctggtcgaggaggtcaacgagaacttttactcgttgatgcagatcaatcagaatgcaacaaatcaggagatcaagcgggctttccgaaccttgtcggtggtactgcatccggacaagaatgacgccgaggatgccaatatcaagttccggaacctggtttcggtatacgagatattgaaggactccgggaagagggagaaatacgacaaggtgctcaaggagggtatgccgaactggaagtctgcgctgtattactatcgacgaatgcggaaagttggtctggctgagggattggccattgtggtgctgatcatctcggttatccagtatgctacggcttgggcagcgtacgccgagaagaagtatacggcggaacaaatcttcggcagtaagttgaagaagttgcagaagaagaacaaaacgaacgttgacatggacacgatattaagcgagattcccacgcccagcatatggaacattctgccgttccagataccggtgtggacatacaagaccatcactggaacgcccggagcgatcaagtcagcgatgaatttctacgccgagcagaagaaggctgaagaggaacggaagcagatggagaaagaggaagaggagttgctgcgcaaacaggaagaagagcgcgccaaactgaaggaagatcgcaacctccgcaaacggaacaagaagttcgtcgctccggaaaagaccgacgaggaactcgctgcctacacccagagtattatccagccgtcggcgaacgacaccaacaaaaccaagccaaagcccttagttagcggtggactctggaccgaggatgacctcactgagctggtccgactggtcaagaaataccccggcggaaccaccgatcggtgggaaatcatcgccgagatgatgggtcgagccgtgtccgaggtgacctacatggcggccaaaatgaaagagactgccttcaagacgcccggtcagacggaaagcgtcgcggaaaccatcatccaggaggccaccaaacagaagatcaagaccaaaaagactgaaccgggttcagcggcggctgaagccactgccaactggtcacaagcccagcaagccgccctggagtcggcgatacagaagtatcccaagagcggatcgacggatcgctggcagaagattgccaacagcgtgcccggaaagaccaaggaggagtgcatgacgcggtacaagtacctggtggagctggtcaagaagcaaaaggaggagaaggaacgggaagcgacggcgacggcggctgctccggaagaacctcaagaatgcccagcggctgaggaacccgcatgtgaagaacccaaatcgaagcccaaagggaaaagaaggcgaagaagcaggaggcagcggcggcggcggtggatgaaaatgacgttgaggcagaggacgatgcagctgataagcagaagggcggcggcaaggcgaagaacaagcgacgcgagcggaagaaggccatcgagtactacagctacgaagattcggacgaagacggcggcggcagcgaaccgggcgagatttagtctgaattcggcggtcgttaggtttaagagcgtgtgaaagcgagtgttcggctgtcggttccgttcggcatcatgaagtttagctttgggttctatggcgagcgcagaacaagtgtgagtttggtaataaaatgtcgtttgattgcctcgaaactgatcgatttgttggagcgagttcttcgaaaaacaaagagggttagtggaggatgagtctgatgggggtaagtcgcgaagtgttatcggatgttcggggcttgcgaatgatgaaggtgcaaacatcaatcaagtaaggcaattgagagaatctgcgatatagcagctgaagtgtgggagcttgcttgcgttatcttgaacgggagcccatgaatgggattggcagacatcgaatcataa

SEQ ID NO: 1719 - DNA, 1737 bp, Aedes aegypti
atggattccacggcatcgcttcgtcggctaacctccatacagataagcgccgaaacaacggtttataccagcctcgattcgagcctcgcagccttgcatcagacccaacgaaagcacgaagatcaggttgatggggcctgcagtctaccccctgccgtggaattgttgctttcggccgctgcctccgttcccgctgcatcggtttacgtctcagccgcctctgccaccgagccaagtgcagaaaaacttgtctcgcaccgtgtgccgcccgagtcggagaaagaagaaagagccgaactgctccactcgagatcatctgtcggtggtgccgttgcccttggaaaccccagcagtagtctattgggaaccgtccaggagaaaccatcgtcgccgtgttcgccgtcgccgccgcctctttcgttgtcgcccgtggtaaccgatcaggactcgcacgtcgttcggattcagatcgttcaatcgaagtgttctagtccaattaacagttctggtgggactgccgtgatcagtgttaccaaccatagcagtgctaccaccattgtgaacggttccaatcagtgcaaatccaaagtgtcgatagtctcattcggacctccggatcagtgtagcaaatctccgagtcctaccccgtcggtagaaatggtccagaagcaatccagcccttcggcgtcgcccactaatggcaccaaatcggacttggtagacgttaacaatgccacctacctctactacatgatgtcctcggggcagtgctcccctagtgacaccctagacagtggcacgtgcagcgatatcgaagtcactccgccgccactcccgaaaaaaatgtccccaaaatccccatcgccgccaaaacaccccgcagcccaacacgcgacgctcatgatgataagcccaacgccgtctgataagcttaatcaagccggcggatatcgcagcagcaactacaccaccagtgacagtgacgagtccgaatccagtctgagttgcgactcgctcaacttctcacagctttgcggaaacgtcagtgtcctcgggcccgtcgatagcctttccgttgccaccacaaatccgcaaactccggaacctttatccatcgccgtaaccccgacaagtgacagtgaccgcgaaaatgtcatccccgagtgcccccaactacccccaatcaccccaatgaagcacagaatcgtatcgatccttccggattcgctcctcaaggatatccgcgagcgttcgtcagcgggaagtgccgcgcgcgaagtcccgtctccgtcgccgccgcgtgaagaaccctcggtcgtcggccttaccaccacgcgttccatcctgatggagaagatcaacagtttgaacagtgttgccaacgccaccggcggcggaagcatttcctccctgtccgagaagaacaaatcgatcagtttcgagaacgacaagttctacaagtttcacatcaacgaacactccaacttgcagcaggcgcagcaatcgcagcagccgcaggataatcgcaacgggtccatccacctgaatagcgccaacagctgttcgtcgtcggttatcgacgatgacgagagctttgccggattcaaggacttgaccagcggaacttcgacgatccggagcaacaagggaactgtgcggggtgtcaagaaccgggttcgcaacgggattgcaacgttcctgcagatgcaacaggcgaatattaaggtaggtggatga

SEQ ID NO: 1720 - DNA, 947 bp, Aedes aegypti
atggcgctcggtgataagcctgctatagataactgctctgagaaaagttttctctcgaactacaaggaaaaggacgccggcaaggtggtggtctacacgaccagtatgggcattgtgagggaaacgtacaccaagtgcgccaacgtcaagcagatcctgaggacgttgctggtgaaattcgaggagcgggatgtgttcatgagcagcgactaccagcaggagatcaaggaccggatgcagagcgaggccattcaggtgccgcaggtgttcgtcgaggggcagcatgtgggggatgccgactgcatcgagcgactaaacgaaagcggcgagctccggaagatgttgaaaccctacaaatgcctggaatcgtccttcacgtgcaaaacctgcggcggctaccggctgcttccctgcccgtcgtgcggcggctccaagaaatccatccaccgcaaccacttcacggcggaattcatcgcgctcaagtgtatgaactgcgacgaggtgggcctggtcaagtgtcacaactgttgagtgcgtcctttcccggggatcgttttgcggtaggaaaaatgttaggtatttttaggcagtcttttgcgtgattgggttgaggatgcttgagatcaaaggttgaatcgcttagcgttaagcttgaaggtggccagcgtgaaccgtgcgagtgaatgggatttgggaaccgctgacttggaaacacacttgcaatactagtttttagtgagagctactgttaggagttgtgatacaaacgaaacaatcattcttcagattttagctgggtaagaaactacgcaagtaataaaatttacacacacaagcaactttatactttataccttattccaagagaagaacaagcaaagcattgttgttaagttttgttatgacgtttgtcactcgttttgttactgctttcaatttgttctaca

SEQ ID NO: 1721 - DNA, 606 bp, Aedes aegypti; identical to SEQ ID NO: 835

SEQ ID NO: 1722 - DNA, 2650 bp, Aedes aegypti
ttggtatatattctcattggaaagcgccgaaagcctcataatcttattttatagcaactggttttatattaagcgattgtaacaccccaacttgtgcagctgtcatcttctttgcgttcgcatctcagaaagcacgctgttctcgttcgtcggctgttgtaaacattctccctcccacagccagcacagcaaagcggtagtgaaacagattttttttcgagtggattttccagcgaattttcaatttaaaaagtgcaaaacttgtgattttattctcaacgacgatgggcaaaaggcgtggtaacaataagcaaaatccgtttgccaagaaaaagcgcgatctacgagagaaggagtcggaaccggcccggcgggagaaaccatacgatgacattgtccgcgccaatgaatcgttcgagacctactacaaacaccagaacatctgcaaaccggaggaatgggatgaattcatgggaaagctgcgtgccaatttgccggtcactttcagaatcaccggttccaagagtcaggcccgtgccctgctgaagatcataaaggatacgtttttctcggagtattaccgggcggtggctgagttcagggagaacggcgaagacgttccggagccgcagtgtttgggatggtatcccaacgagtttgcctggcagttggatctttcccggaaggacattcggcgttcggagcccttgtacaaattgcacaactttttgattgcggaaacgagctccgggaatatcagcagacaggaagccgtttcgatgataccgccactggtgctgggagttgagcctcagcacaaggtgttggatatgtgtgccgctccgggatcgaaaacggctcagttgatcgaagctttgcatgctggcggggaaaatcttccaacgggattcgtcatggccaatgatatcgataataaccggtgctatatgctggttcaccaagctaagagattgagctcgccttgctgcgtggtgaccaatgcggacagttccaatttccccaacctaaagctcaaaaccgaatccggggaaatgcaaacactgaagtacgatcgtatcctgtgtgacgttccgtgctcgggtgatggaaccatgcgtaagaatccggacatctggaccaaatggaaccttcagcatgcatgcaacttgcacggattgcaatatcgcattgtaaggagaggcgcagagttgttggaagtcggtggaaagttggtatattccacatgttctctgaatcccatcgagaacgaagccgtactccattatcttctcacacaaacgggagatgccatggaaattgtggatgccagtcatttactgccatcgttgaaacacaaccccggcatcacctactgggaaccggccaccaaggacatgaagttctataagactttcgacgaagtaccgcaaatgtatcacaccatcattcgtccgcagatgttccctccagctccggaggacgtggccaagttcaatctggagaagtgcatccgagtgatgccacaccagcagaacaccggaggtttcttcatcgccctgttggagaagaagaaaccacttccatgggaaacgagtgaggcagagaccacgaaagaagcggatgccaagaaacaggacgatgaggagccagcccgcaagaagcctaggtaccgcagaggcttcaaggaggatccgttcgtgttcttcgatgggcaggaggatattttcgattccatcaaggatttctacaaactgaacgatgcctttgaaccgaagaacctgttaacccgttgcaaggagggcaaaaagaagaacatctacttctgttcggagatcctccggcacgtcatcaccaacaacgaggaacggatcaagttcatcaatctgggcgtgaagtcgtttgcccgatgcgacaatcgcaacatggaatgtgacttccggttggcacaggaaggtcttccaagtgtaatcggtttcctcggcccagaccgacagctgtccatcggcagggacgatctggtacgattgttgtcgaacaatgatccgacgaggccgccggaaattagcaccctgtcggaagagacgcagaacagtgtgcagaagctgggcccgggaagttgcgtgctgaagtatgacgaagacgatctgcagctggacatcgttggctggcgtggaacgaaaagtttgagggcgtacgtcgatcagcacgataccgtgcacatgctgcgactgctgggtgccgatgtatccaaatatgagaaaaacaaatttgaggccaagaaggaagcagaagcggagaaggaaacgaacaaagatgaagcggacgacgatgtaacggaagatgtaacgcaggccgaagagaacggagaaaaggcggttgttgcagaagtaaaagaagaaagtaaggacacagaagcagtgaaagaagaggcgaaagaagaaagtaaagatgcagcagcagtaactgatgaagtgaaagaagaaagtaaggatgaagatgttaagatggaaagtgagaacgatgtaaaggtggaatcgagttgaaacatcgtcaagcgaacgtagcttgctccaagcaagtgttattatgtaacattaccactaaatgttgaataaacatgaacgatttgaattcctgttcgcaaaatgag

SEQ ID NO: 1723 - DNA, 2956 bp, Aedes aegypti
cctttgcgtgatgtcacggatcagttttttttttctcctccgtcttcgtcgtctcgtcgtcgcgattttgacaccttgattctctcaaaaggaagaaactagaaaaaaatcacttttccgaaaagagaacagcccgtttcgttggaaataatcgtgtttcgtgaccgcggtgtttttgtgctgttcgacatcgtcgaggcggcatggaaatctagcttggaccgggtacaatatcgaaaaaacgggttccaccgcaacagtcggatcggaacagaagggattcctcctctagccgtcagtcaccgggaacttttttttttttgttaatttgcacggggagtgttatttccatacgattgtgccgattgcctaatttagctgaaagtgttgaggagcggtagtattgctctagaagtacatccggtggaacgatggaagcgctggtagaaaattcgtcgaatcctccgtgccggttctactgtcactcttgctcagtggaaatagatcgggtttcatcgaacttcacatgtccgcactgctcggaagggttcatcgaggaactgccagcggccgaaagaagcaacaatcctccttccccgccgccgccagctggttccaatggcgattccaatacaaacgatttcatcaatccacaggcaattcgattggccagtgaaatcttcagcagcagcatcctgtcgccccttctgctgtcgacgtcgagtgggccacgtggttccgattccgatggcgccggttcactaggggatgatggtatggacacaggggcagtgggtgcttccgccggcggtggaggtggccccaccttgatgagaggcttcggaagacaccgcaataggcgccgtggcatgcagaacatcaacaatctggacaatatcctgcgggagattctgatctcggtggcagacggagcgaatggaggtgccggtggaacgcccatgttctttatgggcaatcccggagactatgcatggggccgggaggggctcgacacgatcgtgacacagttgctcaaccagatggacaacacgggaccaccgcccttggagaaggagaaaatcgccgagataccgaaggtcacaatcagtgccgagcaggtggacatgaagctgcagtgctcggtctgttgggaggatttccagatcgacgaagtcgtacggaagctatcctgtgctcacgtataccatgaatcgtgtatcattccatggttggagctgcacggtacgtgtcccatttgccggaagagtctggcaccggagcaacaaccggatgaacagcgtggcctagcagctgcagcgaatgccgtagccaatacgttacgatcactccactcggacgcgtttcccggtgcagcgagccactcctcgtcgtcatcagttgacgagggaggcccatcctcctctagtctactagtcgatctcgccccgccgatatttcccttcaacgccggtaccggtgccagcatgggaaacccaaggtcccacagttcgaacccctcgcgggaaagcaatgccaactcgtcgtccacagcatccccctctgccgccaccgccaacaatccctcgtcgtcggcggcggcggcatccagttccggaagcagtagatcggacaactccggcaccaacaggtatcgcgaagacgatggcaacatcgattacgaatttgattaatggtttcgaccaccacggataagaagaagctgtgaaacgcgaggttgcgatgctttttaccaaaaaaaaactgttttgatttgccactttttcggttcactccggacgccaagcttgcacggaagctgcaagaggtccgggatgggaactctgttaaatgtaattgtagatttttcttttctgatggattcaccttttcccgttttgtatatttaatcgtccgagcactatctagatgtatctaacaaaagccatgagtttttgatatgtttttcgtttcatccactactaatggcacgcttcttgatattcgtaccaaggtttcctacaaaggtcatacttgagaaccacagtatcgatatctcaaagtgtgttggcccacaatagatcagcttaggatatgatttttgcaataaatagctacccaatacgaaatgcacatctgccacatgatttaaagaatcgcgatctcagttcagatcgttcgtactatccatattacggagcattcgtgcgattataataattttcacatttcgctttgcgcacatctgagacagaaactgtggtgaaacgacagcaaaaaccacagagtggaacggtccccaaagggtagggaaactctttgcttatgtgaacatgaaaaagaaactaaacctgtgctatagtagtttaactaaataactgattaatcgtaagacaaaagctataaaactgaacagcggcaatacggctaactattgaatgataagacaaaaactatgatacaaaatatgaacatgatgaacaaaacaaggaaagtaatttgtagtcgcagataaaaaccgcaaacaaacatcaatttatcgttgaaaattaaaagaaacgcgcccaacatcattttatatttattcggtaattgatttctccttatatgactagaaaatttattggttattaccatttcagggctggtagcaggtctctttctgaagtcttggtcaatattttaatgcaagcctctattttaatggaacgtctctgaagtatattttaattgatttgttctctaaagtatcttttttttttcttaatctgcttgcagtaaatcctggtgctagaggctcctggcatttgaatttcaagcttcctcctgagactcctcaagaaaaagattaaacaattcttaatcttttcgtttaattcttttcaaaatattactctagcgatttgtgaggggtgattagaggaatttgctctacgaaatccttgagcacttcaacgtt

SEQ ID NO: 1724 - DNA, 1397 bp, Aedes aegypti
atggtcagcgaagtggaatccagcgataccgatcagtggccggcgagtcaggaggcttcggaacctggagattcacaaaccttgcccaacatcggtggcgaaacagttcctccggatcgcagcggcgggaaaacggacgaattaagccacttggaagccacatcggatgtccgggagaagaaagcgtttagctgtacggaatgtggactgattttccgcaagcaggacgatttcgaccggcatcggtttgcccacacgggagtgagggaatacctttgtccggaatcgggatgtggcaaggagtacaccaatcgggcccacttgaatcgtcacatccgatcgaaccaccggtcgaaaatcccggaatcaacgaccaattccattcgatgcaaacacccttcctgtggcaaaaccttctcctcggatcagaacatgcgaaggcattacgacctgaagcatattctgggcaaatcgtggacctgtgacgaatgtggcgaacggttctggcgaaaattgcagttgaagcagcattccttccggcatacgggtcaatatcctcatcggtgtgaccactgcgataagggattcatgaacttgaagtctctgaggcatcatcggacaacgcatgctatccacaaatgtgattcctgcccgtcggaattcactcgctggacggacctggtggctcaccggaagttgcagcacgcgacactgtatcagtgtgatatttgtcagggcaagttccgttccaagaagaacctcaaggctcacatcgaagttcaccgaaaaaacagcggaggaattgagcaggaggtgttccagtgcccgtacgaaggctgtcccaagttctacgactaccagcgtaacctgatggcccacgtaaaggccaaacacgaaggaatccggaagttcgtctgtcccgttgaggactgtggccgctctctgtcctcgcagcagaaactggaccaacatcggcgaatgcacgaatccgccgctcggagtgtcccccgtatgaaggttcccgggaagccggtggcacggcggaaagacgccggacagcagaagcgatcgaccgcatcgcggttggccaatgtgcgcctggaaccggatgtggagcggatactgatcgatcagagccccgatcggaggccgacaatcgagctggaggggtcgttttcggtggattcggcatccgagtcggaggtggaaccgtgcgttgcggtgggggcagtcctgcagggtcagctggcaaggatacaggatgagattcggcggctgcaggagcggtcttagtccctagggttagcgtagctgattgcaacgggtttgtatacaaagtatgtttgatttgaattctaaaagtattacgtggtgtggatgccatgaacaaggaatat

SEQ ID NO: 1725 - DNA, 878 bp, Aedes aegypti
gtttgcttgcgacgtgtagtggtttcttcgatacgtggattcccaaagtggcgtagaaagtgttccgaaggcatccatccagcacagacaggcagcttggtcattgagtgtgagctggaacgttaatcgcggtagcaattcctaaccaactctcagccagtcgagagtataattcgtgtgttttcgatctgaacttccaagtgcttcggtgaatatccactaaatcacaaaaccgacaaaatgcctgctccagccagttcaacatccgtgggaagcggaagtcgatctcccaccaagcccacatctgccccccgggcaagtgccggaggttccagcaatctgaagcaaagaaagacaacgaccacgacgactgctgcccggaatcgtaccactggaactggctccggtggcatgtggcgtttctacaccgacgattctcccggaatcaaagttggtccagtgccagttctagtgatgtctctgctgttcattgcgtccgtgttcatgctgcacatctggggcaagtacacccgctcttaaggatacctagttttataagccgcgttcgcgttttctaaactgctcgtggaaagcactccgcaaagacgcattcactttatactattataactctttaacattattgtttctaagtatgtttcactcgatgcgtgcccggaaggcattttccttatattttttcatatgttgagtgcgttccggggaagatattcttttccggagatgattcatgaacccatatgattttgtactgatgtgtcgattcttgtagaggaatatacaaaataatttaattcacaaaaggaaaataacgttatcatttgaaaaactataataaaaatatagagatttaagaa

SEQ ID NO: 1726 - DNA, 1034 bp, Aedes aegypti
agttttgctttgaccaaccggcagcattgtttaccagtagcttttctgcgtacgtgaactattttcaactaattcgggaacgaaaacggatttaaaaccggaagctagaatgtccaaggaagcggaaaccgcccgttcggacaaggaactggatctttcgaacgcgggtcgcggtgtttggttggtgaaagttccgaaatacattgccaacaagtgggagaaagctccgggcaacatcgaggtaggaaagctgaagatctccaaacaggtcggccaaaaagcccaggtctcgttgaccttgtcggaagcggtgatcaacattgatccgggtgaggagattccccgggagcacaagctggacgtgtcggtggtgaccaagcaaacgttgggcgtattttcacacagtgtcccatcggggaccaaggaagatggggcccccgagggagaaaagctgttcatggagggacgtatcgtgcagcggctggagtgccgtcccctgggagacaatgcctacatgaagatgaagctggagtcgattcggaaggcttcgcaaccggcccggcaggtcaaatcgctggagaagattgtgcacaacttcaaaccggtttcggaccacaaacacaacatcgaggacaaggagcggaagaaggccgagggcaagaagtcccgggacgacaagaacgccgtgctggacatgctgttcaatgcgttcgagaagcaccagtactacaacattaaggatctggtcaagatcacgaggcagcccataagctatctgaaggaaattctgaaagaggtgtgtgactacaatatgaagaatccgcacaagaacatgtgggaactgaagaaggaatatcggcactacaaggacgacgacaagaaggaggagagtaagggcatgtccgatagtgacagcgactgacaatagtgaggaaggaagggtttatggggttgggattgatcaatttattgtatgtaaggacttatcaatgttagatcgataggatcaggaataaatttaatttgacaatatg

SEQ ID NO: 1727 - DNA, 1593 bp, Aedes aegypti
ctcaagcaacctcccggttgctcctgctggcagctattgccctattaccagcagccctcggtggatcaccatttatgcactctcgccctagaaccatcacacgaactgttagttccaacatcactctcgatgaaccgaccctcgcaaatccatacctggccccgggcggaaaggaagcccttggcacgaaacaagtgtcggattttagccttagccaaggcaagaacgttttcgatgtaatctaccagtggaagattatcgatttcttgtacccgagcctgcaggctcgcaacgatgccattcgtactaaacaattcatcccggagaacaacctcccgctgggcgttgatcgcttccgcaaccgcatcttcatcaccacccctcgctggaacccaggtgtaccggctaccctgtcgtacctgcccctttcccgttcaggacccaagtctacctctgatcccctatccagactggagtttccatacgtccccccaaaaccccgactgtagtcgtctcgtatccgtgtatcgtatctacgtggatgagtgcgatcgcctttgggtcctcgacgccggagttatcgacacccttaccaacctccaacagatctgtccgccaaagatcctagcattcaaccttcacacagacgaactgctgttcagctacactctcccagcggatcaggtcaaacaggactcgttgcacaccaacatcgttgtcgatatccgagacgctcagtgccaggatgcgttcgcctacgttgccgatgtgtggcgctacggaatcaccgtgttcagcttgcgggaattcaagagctggcgcaccaccaactacctctacaacccgaatcccttcgccagtgactacaactacaaggagctgaacttccagtggtctgatggagtgttcggaatgtctctttcgcctgtccatagaaatggcgatcgcatgctgttctaccacccgatgtccagctacacggagttccaagtaccgacctcggtcctgcagaacgaaaccatctggcagaacttcggtctggccaaggcattccaaccggtgggcagtcgcggtaaggccggtcaatcgtccacctccggagtcgcccacaacaacgtgcagttcttcacccttgtgcagcagagtggagttggctgttgggatctggccaaaccgtacaaccgcaataacttaggtgtggtcgagaaggacatggacaagctgacgttcccgaatgatttgaaggtggatcgcgagccgaagcaatcgctttgggtgatcagcaacaagctgccggtgtttttgtactcgcgactggactacagcgaggtgaacttccgagtgctgaacgccggagtgcaggaagcgattaagaacaccgtgtgtgatccacggatgcctccgagcttggcctacgaaaaggagccggagtgcgatgtgtagagatttgatttcttttatgtattttgatgtgtaagttttactactgttgataagagttgtctagagtaaggtttaagttttgattcagccgtgctgatatgataatagtaaatccatgctcgaccagtgaaaataaatgattcaaagaac

SEQ ID NO: 1728 - DNA, 1435 bp, Aedes aegypti
atttctactgatgcagtttacgggtttcctgagcgctttcgcagctttagtcaagataattcaccaaaaatccaattaaaagtcatgataattttatagtttgctgcctgaacgtttcgtaaaatgttgacctcaaagataagcaaagtgggcaaagtggtaatttgcggtgccaaaggtgtcggaaagaccgccattctggagcaattgatctacggcaatgttaccatcgagtcggaaattcacagcacaattgaggacacctatgtagcaagtgttgatacaggaaagggcagccgagatacgttgaggatctacgacactgctggccttcagggcagtgttcaactgccgagacactatctgtcctacccggatgccttcgttttagtatacgacccaagtgatccatccagcttggacatgctcggtggaatcaagagtgatatcgataagtataaagataaaaaagaaatattcataatcgtgatagcaaatatgcggtctcggcagacccgctcggccggatcatccccgatcaattcctcccagcattatcagcttaacaacgatgcaatcgaatcgaatctcacgcgggccaataattggtgcgctcgtgagaggatcaaacactataccgtcaatgcaatggaacgggcttcgctgtacgaaccattcgtgcagttggccagccgattgtatcctcctcagacaaagagtagcttcccacagcttcgtcaactgacacagaaaacctccaaagtagacaacagttagtgaaatgttctgtgcatttttatactaggaaccaaaaattgcttgagttggagtcgtcatggcgcgactcttgcctgctcgagactaaaacggtctgaacgagcctattgggctgttcttagtgattgtacgttgcaattattactagagtattatagattctttccttttatgttcagggaacccgttagactgcactttactgtaatggagttttaaaaattatttaaaagaagaagcaccattctcattagggcggcgcaaggcctcggcatcctcaaattagaacgctaagttcaatgggcatttacaacgcccggcgagttgtgcttagtaaggattgagaaggtttgatggataagcgatactttgattcgtgacaaatcgtgtgttatgaataggagaagactacgtcatttgtgtaccctcttttatccgtttaggttcatttttaagtattagttcattacgcacccagtttataagcattctgcttcctattagtcatctatcgaaacgtgtatctcctgaaaacgtacttactagaattaaggctcggaaaagtaaagttaggattagttgatatcaaatagtaatgaaagcaaacccaatagaaacgaaatacatttattttgctttacaacattttgattgcaat

SEQ ID NO: 1729 - DNA, 3706 bp, Aedes aegypti
cagttgctttcgatcgtgtcggacgtgcgtgagtgactactttttctgatttttggtttctggctgctggcttttctggattcctacagcgaaaataaacactcaacaaagttttggggaatttccgtctctgcctgccattcgcgtcgcgtcgaccactgcaatcctccgtaggtccgtccatctcactgcaggatcacggtgaaattcgcggcgcgagtgtagtgccaatctggtggaaattacgtcgggaagtctctggcttcggattggaagtgtgctgttgctgtaattgatgggggaagtccctgcgaagtggattagggctgtttgtgaatttattgtgtgctgaataggtcaataatttgcctggttccgactgtgagcggattgtttatccgtggaatcggaaagttcctatactagtggagacaagcgaaagtcaagaaaaagtctcaggaggaggagaaggaaaatatttggctcgtgtcacaagtggcatagaggaagtgctttgtgagagaaagaagctgctgtggcatgggaaattaaaagaaaaaaaaatgacagcaatcgtcacggaaggtcagatctgaaaagagctctcgaataaaagttacaggaagtcaaaattttggggggctattgtgggaatcagtgcttgaaggaagcatcaagaaaagagcactacacaatggatacatcaaaggagacagaaatggatgaaaacaccgagctggatccgagaattcagatcgagctagaaaatctcaacacagcaacggatgatattaacaagttggagatcgagctggaggaagcaaaatcaacctttcggattctgatgaatgaatccacccggcggctgaagctatcgtccaagaaactgggcagctgcatcgacaaggcgcggccatattatgaggcattggaaaaggccaaagcggcccagctggaatgtcaggcggctgcgatcaagtaccagcgggcaaacgagatccatgcggcagcgaaggaaacggtggcgctggccgagcagcggttcatgagcaactcccacgagtggcagttcgataacgcctggcaggagatgctgaatcacgccacgataaaggtgatggacgccgaaaagcaaaaggcagagagcggagccgaacatcagaagaaggcaaaagtattccaggaagcagaactgaaagtacaacacttggaggagcgaaaccggcgtagtatacagaaatcgaggccatactttgaggaaaaacaactgtgccaggaacagttggaagcacagaagggacgtatccagcagctagaggatcagattgttgcagcgaaaagtgcctacggaacggcgttgcgaaatttagagcaaatcagtgaggagatccacaagcagcggggtgacttgagtctggcagctccgtccgggcctcgcgagcctggcgtgggtgcagaattatccaacctccctccgacgacgagctcgatgaagcttagctcacccggtgccagcagttgcagtaactaccacaacttcagcagtaatatgccagacatatctacagagctggacaaatgcgagattcactcggtgggaagtacttcgttggcaactagttccgctgtcagtgagaaggaccctactgacgatgactatatgaacgacgcagatctgaatctggaattgctccgccagaaagtgaaaacactagccgtccgtccagtggaaggtggcgatggccagcagcaagagcaggatgtctgggagcacgagctgaatgctaccgtcgacaaactggaccaccttatgatgctgcgcgagtcctctgccaatagcttgagtggatcatcgctggtcgacagcaatcaagctaacaactatgccagcctgccaaccaccccgaaacatcaccagcagctttctccggtgctggcggagaagcaaaaaattaaaatgttcaaaaaactggatcctcttccgcttgccaacgtttcaatgtatgcgcttccaacttatctaagcagtagcggtagtgggatgactcctgctcgcacgggtattccttcagttcctatgggacacaatgatctagtgacgcctcgtaacgagaccgtagctcccgttattgggctaaagagcaaacggaaaatgtccatgtaaaattaatggtaactaaattatttgttaagcaaatcttcgactgacaacatgcaaggacggggattaacttttggttaaatcctatccagattctctggagaaggcacggttccccggctaatatggtcgtgacatactaacattaacgttattttttaacaatattataagtccattcgctccgggctttttcgtatattttgttcattttctacgttttactagaaataacgaaatgaaatgaggtagtgacgaaactcgaaagacatatgaagaaacatggcaaacatgatgatatgttgcctctgttttcaactatttgctcactacgggcttttgtacatacttacgtgaaatattatttttagtaatgtgatatatgtatctttcaaacaattggcatttatatacttgagttgcacctttcacaatcttactgattgtttcaatatattcattctattttttctatatatcttgcaaattgtattcggctctcgacacagttaccttaggaagcaatctactgctacactaaagatgaaaattgatacactttgttcagtacaaactcggaacgtatacctacttaaagtatacaagcggtagtaacattgcaacagaaaatacataatagtaaattgtaatgattacagaatgaattctatattttcaccacaacctggttttagcaaaaataaaagttctttagaaaatgaacagtagggcaaaacagtatactgttttgatagccaacacaatcgaaagacataaaattgtaggtgtgctttcgtcctctacacataaccaatgaaaatcgaaagcagtgaaaaggcttcagccgaaatgaagtaaagctttattactattacatcaagataaaagaaacattgatcacacaacttacatttagtattcaaaagaatcagtttaatcccagccactcgccttcaatttttcgattgatttcaaagatgaaatccacccgatttatgtattgttggtacattatcaagaagacaagagttttatgagtgcagtatcatagaagaaaatatatcgtttttattttgttgaacatgagagaactaaaacgaagagttgaaatggtttgatacgtttaacagactttaaagtagcataaggtaaaacttttaaaggtgaaaatttacggtttgattttatgcatctaaataaacttgacagcggatttagcgatgttgaaaaacaaaatcttcttcaagttggtcaacctactttggcacttctctggttcactttggcagggtggttttgataggtctgaaacttagctataagatatatttgtgtatatagaatcttgtgagtgatttttgactgtaaagcttaaaaaccatgccaaagataaccaagatagcccaagaataagacatgtttctcaatgcttgaagaggattttcctctgaaatcggtgaaaatttgaaccctgtatggtatggtttatcgaaaatttgatccacccgtctgtaaacatgaaataaaaactatattaatgcgtaa

SEQ ID NO: 1730 - DNA, 1609 bp, Aedes aegypti
atggatcagcagcagtactgcctcaaatggagcaactactcgtcgaacctggcggcggccttttcgaacctgttcgactcggcaaccctgacagatgtcacactggtctgcggaggtaccgtcttcaacgctcacaaagtcatcctggcggcatgttcgaagaacttcgccgacctgttcgagcgggccccagttggcaccggacagatttgcgtcatgctggaggccacttcggccgacaacatgcacgctctgctggagttcatgtacaagggtgaagtgcacgtttcacagaaatcgctggagagcttcctgaaagccgctgagaatttgcaggtcaaaggtctcaccacagagcacggtcgtttcgcgagtgcaaatgccacccagtcacagcagccggccttccacgagtcaaacaacctgccctcgccagcctcccgccgacagcagcggaattccctgtccgcctcgctggaatcgatcaaccggatcggtggtatcgtgaaaaatgaacccctgcccggaggtggtggtggcggcggagggggaggcggtgccggtggaggtggcagtggaggtgccacaacgcccaacttctcgtcctacctgccaccgacctacatgcccacgccgtacgaaagttcccggaagcgttcgatccgcagtcccttctacgaggaagccacacggggtagcgtgctacgggacggcaaggccagcgttggcaacgacagtccggtgagtggcagtaaaaactatcggccctcgagcagcggttcctcggcggcacccaccgaagcggacacggcacacacggaccgggattcgccccagcagtcgaaccggtacgaaaaccacagccccagcactacccaccacggcaacggaaacggaccagtatcatcgaacacgttagaacgggacgatcggagtgatcgggcgccttcggaggacaaaatcaaatgcgatggcaaggaaggaaacgacaacggtgccgaagatctgcgaatgaaatcgaacgaaatgcgaccgatccagtcaccgctgacgtcttccgccccgcccaccccgacgacaccggtggcattcatgaaaggaggcctgcccggaggactggaaggactgaatcccaccgtcgatatgataagcaaaaagctacagtgtcccctctgtgatcgccagtacggctacgaaacgaacctccgcgcccacatccgccagcgacatcagggtatccgcgtgccatgtccctactgtagtcgaaccttcacccgcaacaacacggtccggagacatatagcacgggaacacaagcaacagacgcagtacatgaccaaccagctgcacagttaagatgttaagttgcgctgagatgaagacaacgctgaaaaacgagaaacgaacgacacaacaaacaaaaaactgccagcagaccatccgcaaatcagatcagaacaatgaagtaaaaagaaactcgcgagcattgatgatatagaagaagctgtcgctatgccgatggcacgtgataatagggaaaatacgagaagagctgaaatccgaaatttatttcgcaaacaaactctgaaataaatattaatagcataat

SEQ ID NO: 1731 - DNA, 1618 bp, Aedes aegypti
atgaccaacgcgggtgattcaaatgtgattcagcagcatacgttttctaatgaccaactttcgatcgaagctgcgcatcatcaaacggagccaacattcatcaaacttcttcatcaaacggagccgacaccgaacgtgatttcggtgatcccaacgtcgagtgccatatcaaattctgagccaggatgttccaaagagctttcatccgttctgcatgttgcatctaatagtgatggtatcacgtttgcagagataggcgatgacggtttatctcagcaaaataacgctgaaaacgcacctttggtcaatgatgacacaatgaaaagccagattgtggaattgctcattgaggaaacggagattacgtgccccaatattgtcaacaagagaaaccaggaagaggtgaaagtattcaaaagttccaaaaagtttgcttcaagtgaactgaaatttcggtatttccaaatcaactggtgcaagatcagtgataacactataagccgcctgaatgaattgcaaaagtatcgtaatgaaaatacggataaatgcgcacctcgacagctgcaactttcaaaaaccgattggagcaacatcactaattcagtagttgaccaaatgcgttcggttgatactgaaattaaagcgagcgttatggagaaagtggcaaaggacattctggacaagtatccgtgcctcaatgtgttggacgacgatggatttggatcaggaaaggattatgtcgcggttaagcataaaatgttaaatcgcaattcgtaccttaatcgcttcaaggaagaccaagatcaaccaacaccatcaaaaatgaaagaccgtcaaagtcgtaatgtacgtgctggtacgaataaggagtattggaaacaaacaaacaatgaatgcaccaaggatatgttatcatcattgtcccgcaatgaaaccgaattgctgacacaggagtttctacaagcatcacaatcgtatgtgcgatatcgcttcgatgaaaacaaaccattgaaagaagtagtagccgatttcccagtattgcgaagaaaatgtctgctggattatcattttgaatgtgctactggtgttgcagctggatcaatggagaagtatttcgccgcaaaacgtcaaaagctcatcgaattttcaaaatcgggacgtaagacaaccccattgactgtaacggctagcgacgtcgatatcatccagttcctgtgcagtttgttgggagaaaaatgtgaagatgtcattgtatcgaaagagatcgggacaagaattgatgatattacaactgaatgttcaggacctgttcttgttgctgtagattgcggaaacgaaaagaccgtttactatgtgttcgcggaacaagtaagactcagcgaggggacagagaatgttattgccgctatatctgaccttgtatgcgttcactatgttcacaacttcatgtacatgcagcagatttccaaatttctggaatttgtacaggagtacttttttaagattttgccaacatatggatcgaagtctaatgcgacgcgtaaagggcagcaacagcgaatcgttaaaaaggtcatcaaaatgatttcggagtattgtgcacagtaagtcacgtctg

SEQ ID NO: 1732 - DNA, 1859 bp, Aedes aegypti
  misc_feature (1333)..(1858): n is a, c, g, or t
gaagaagaagttaatccagcgtaaattgctattcgggcggatttggaactgcaattttgcagtaatatctggattttatgttaaagtactgctattttccatcatgagtggcacttgagtagtaattgatttaatgataatcgataatagtttaaaaagttcaaaaaaacgaccatatcatcactcaaagtggttgtacccgagtgctgtatcgcccaaatcgaaagtcgctcttggtttccgaaaaagcgttggaaactttccaagcaaacctcgcgggaaaaaaagcgaagtgcggagtgaagagagtacaaaaagctgcaagcgaaagccggtgcataaaaccgtttgttaaaggattcctgcctgtggcctgagaaatagcgtgtgttgtggaaaatgtctcagttcaattatctcaatgagctgaacaatataatcacaatggacggcgaactgacaaaaggacccgctcctcggtggcaaaaaaagatggatctttcggcagcatcatcgagtttcaacgcaagctcaatgaacacatctcgccagaagctgtcggtttcgttcaacggccagcaaacggttccgcccgggacgcttagcgggaagaccccgagtaaaaaacccggaggtggatctagcaccaagaaggaaggtaaatcccaaacgccaagtcaaaagcaaccttccggcggggacagattcatcccgaaccggacgactacggatttcgacctgggtcactacatggtgaaacagaacgaagccaggaaggaaaccgaaggcgacggaagcggcgaagatgggcagcagcagcagaacggaacgaatccgagccccaagaatgccgagcgcatcaagattctatcagaagcagtcaagggatgtgatataagcaacaaacggattttgtcctaccagacaaaagcaccggcagccccggaaggacacatgaaccccctcaaagtggtctactcggtgaagacgcccatgtccacgaaaagtggttcccgcttcattccgaatgcaccggagcggattctggacgcgccggacatcatcaacgattattacttgaacctgatggactggagcggggacaatgtggtggccgtggctctcggatcgtcggtgtacctgtggaatgcggccagtggcaatatcgaagtgctgtacgagaatgaaggcggtgatcatgcgtgcgcactgagctggattcaggaaggacacatactggccgtcggaacgtctacgggcacagtggagctgtgggattgcgaacagatgaagcggcttcgaatcatggatggccattccggccgggtgggannnnnnnnnnnnnnnnnnnnnnnnnnnnnnnnnnnnnnnnnnnnnnnnnnnnnnnnnnnnnnnnnnnnnnnnnnnnnnnnnnnnnnnnnnnnnnnnnnnnnnnnnnnnnnnnnnnnnnnnnnnnnnnnnnnnnnnnnnnnnnnnnnnnnnnnnnnnnnnnnnnnnnnnnnnnnnnnnnnnnnnnnnnnnnnnnnnnnnnnnnnnnnnnnnnnnnnnnnnnnnnnnnnnnnnnnnnnnnnnnnnnnnnnnnnnnnnnnnnnnnnnnnnnnnnnnnnnnnnnnnnnnnnnnnnnnnnnnnnnnnnnnnnnnnnnnnnnnnnnnnnnnnnnnnnnnnnnnnnnnnnnnnnnnnnnnnnnnnnnnnnnnnnnnnnnnnnnnnnnnnnnnnnnnnnnnnnnnnnnnnnnnnnnnnnnnnnnnnnnnnnnnnnnnnnnnnnnnnnnnnnnnnnnnnnnnnnnnnnnnnnnnnnnnnnnnnnnnnnnnnnnnnnnnnnnnnnnnnnnnnnnnnnnnnnnnnnnnnnnnnnnnnt

SEQ ID NO: 1733 - DNA, 1165 bp, Aedes aegypti
atcgaaagcttttcgttggcatgcttagcaagcagcaaaccgaggaggatgtaagacagttgtttaacgcattcggaaccatagaagagtgcacgatactgagaggaccagacggtgccagcaaaggttgcgcctttgtgaaatttacctcgcatcaagaagctcaagctgctataacaactcttcacggtagtcaaactatgccgggtgcgtcctctagcttagtggtaaagtttgcggacactgagaaagagaggcaactccgtcgtatgcagcaaatggccggtcatatgaacctgctgtccccgttcgtcttcaaccagttcggaccgtacggtgcctacgcacaacagcaacaagcagcactgatggccgcggccaccgcacaaggaacctacatcaacccgatggccgccctggcaacacaaatacctcatgcgttgaacggttcaggacaacccgtgaacggtaccatcccatcgctaccctcgccaacgatgccaaccttcaacatggcagcacaaacgccgaacgggcaaccggccggctccgaagcggtctacacgaacggaatccctcaaacctacccggggcatgcgctccacctgtcgataccggcccaaggacttccaaatggggacgctgccctgccgcatgcggcgtatcccggcatccagccctatcccggtgtcgcctacccagccgtatatggacaatttccgcaagccataccacaaccgattgccaccattgcaccagcacaacgtgaaggctgctccatatcaggcccggaaggctgcaacctatttatctaccatctgccgcaggaattcggcgacggagagctgatgcagatgtttatgcccttcggtactgtgataagttctaaagtcttcatcgatcgggctacgaaccagagcaagtgtttcggttttgtgtcatttgacaatcctgccagcgctcaagctgcaatccaagccatgaatggttttcagattggtatgaaaagactgaaagttcagctgaagagaccaaaagacgccaaccgaccctattaacaatcagagatcaaaagcgctttaaagagtgcttctgctgaagctttaaaatacgaagttaatccctagaaaaaacgaaacactatatcatcaattaatgaaaagtg

SEQ ID NO: 1734 - DNA, 653 bp, Aedes aegypti
atggaaaactactccaaagaaatgtcattcgcaaaactgacattattctggtgccttgccgtagcggaaaattgccggaaagcgactaaatttagtgcgaaagtgtacgcgagtgatcacgaagcgcaggacagaagtattctgagggagacggtcgctccaccggctacagatgattcatctcccgcacctccggatggggctaaggaagtgcagaagatgcactcttcctatcaggtgttcggtcaacgaatttgcccgtacggaggacgtttgtatgccattcagaagctggattatgcggcccatgaagacatcttgccgtatagttccggcagcttgagttcgattggtttctaggctgccgacatagctgaagaagaaatcatcgaagacggtcacccgtatgcctacatgggatatcaccagaagccagctgctttggtgcattggatcggcacgagaaacttgatcgagatctgcggtttatttcactgtttgcggagggatgcttatcactaccggaagtgctttcaggcttgtattttttggctctgtccacttagagtcctcggactacaccacctgaagcgtctcagccgttatcttgtatcatttaaaatattattaattcaataaaaattgtaataaat

SEQ ID NO: 1735 - DNA, 465 bp, Aedes aegypti
ccttccgaatcaacaactcactcatttcgcagcttacactcttacccaattcagacgacgcccaacccacaacccactcacccacctcaatcccccttaaccccccatcctaatctaacaactccagtgcctccaagcaacgctccccatcgtccagcggggacgacgacaagcgctccgtcccatcgccgacctcctgcagtcgacctcaggactcgtccggatcgttctcgaagtgatggtagtggtggtggatgtgctcgtgcacgtaccgatgcacagccgtcgttgatgccgccgacgccgacgaacccgagttctcccccagcagactcgctccggcgtggtggtggtggtgatgcgtcggactgctcaccgatgactgcggttgctgctgttgttggtgcgttccctgttgctgctgaacactctgatgcagttcctcttccgcgtcggaaatcctga

SEQ ID NO: 1736 - DNA, 1629 bp, Aedes aegypti
cgcagtcgcagttatcaagtgcatatggaactagacggcgctattttgcgaaatcggaaaaatctaagaaaatacgagtggttaatgttaataccggtcgcggagtgtaaagaaaggttgggttgatttgccgcacgaatggaaattcctcgctttgtgataaatcggaagggaaaatagcaacaatgttcgcgaacattctatttcgacgtacctttcttaacatggcggctgccatcggaccggagcggcttggcgtggccggaaagaagcccttcactgttttcattgagggaaacatcggcagcggaaagaccacattcctgaaccacttcgagaaattcaaggatagggtttgtctgctgacggaacctgtggaaaagtggcgggactgcgggggagtcaatctgctggatctaatgtacaaggaaccgcaccgttgggcgatgccgttccagacctacgttactttgacgatgctcaacatgcatacttatcaaacggataaaagcgtgaagctcatggaacggtccatgttcagtgccagatattgtttcgtggaaaacatgctcgcgtctggtagcttacatcagggaatgtacaatattctacaagagtggtatgagttcatccatgccaatatacacattcaagcagatttgatagtttatttacgaactagtccggaaatcgtttatgagcgaatgaaaaagcgcgcaagatcggaagaaagttgcgttccgttaaaatatctacaagaactacacgagctgcatgaaaactggctaatccacggaactttcccgagagtagccccggtcctcgttttggatgcagacttagacttgcacaacatcagctcagaatacaagcgatccgaaaccagcattctcaagcctattctcatagataataccaaccagcatcccattcttgcatcacccagcaaacgatcgagaactgaattctaatttataataatttatatttcgctagttcttcttgatacttcagtgcggtatcaagatatagatgatttaggacttaacatagtataagagtgcaaatgttatattattacgattgtagaatacgattaacacattcacacgcaaacacacacaatatggttagccaaagaaacaagcaaattattgcccatccttttcaggatggccaaacaaaatagaaccgaaccgtgttaaaacagttttcaataatacgaaaccgaatcagctttctaaaatggtatctccaaattacaaatagtaacagcagacgacgttcgagcaatgctcgaacagggctatactaaattcatgttctacagtaataggtaacttaacgctatttattagtattaatttgcttttaagatgctaacggaagtgtaatggaaattgataagtatttggtttagttactactagacgatacttctgattcatgtcgtttccacatcacatagcgacaaagtatgagtgcgaataatttggtcaagggtcttcaactttgaatcatgtttagtaaataacttttgatatccgagggtatgcaatattgtacatatgtacacacttttgtgttcaattgtataaaactggattttgaataaatgtcagtgaaaag

SEQ ID NO: 1737 - DNA, 816 bp, Aedes aegypti
tgacagctcaacttccgtctccgcgtcgttcgccagcggtccgttctctttctagtttgaacgtccaaacaagtgagttgtgtttcattttggtgccgctctcgtttcgtgtcggaaggacttaaaaaatgcgttacgtggctgcatacctcctggctgtcctcggcggaaacgccagcccatcgaatgccgacatcgagaagatcctgagctcggtcggtatcgaagcggattcgacccgtgtcacgaaagtggtcaacgagctgaagggcaaatcggtcgaggaactgattgcctccggtcgcgagaagctctcgtcgatgccagctggtggtgccgccccggctgccggtgctggtgctgcggccggtggtgccgctgccgcccccgctgaggagaagaaggaagaaaagaaggaagagtcggaatccgaggacgacgacatgggattcggtctctttgaataagaaggggtaagttgagtgtccttgccaccaggaccgcccaaaatccgccaaatatcgtgatgaataaacttatcaccatctttcgactgatcacatcgtgactgttatatagttccttaactgatgccggtttattcaaagctattggccactctgggaatcggatgcgattactaatcagggcgctttctgtttccctttgcagattccagcacatcgtacaaggatgtgtcacgatgaccattcgttggaagggtacaacgtatttatttctgtgaaataaattaccaccaaaaaaggcaagaaaataaaatcaaggaggagactctgctgaaaagccaacaccaaa

SEQ ID NO: 1738 - DNA, 1172 bp, Aedes aegypti
atgggaggaggtgagcacactttgcaggaaaaactatctggtacttaccgtttcgtcaccgcttccgtttcgaccgagcagcaatctatcacccaacttgctgtgccgttactctgtcacgttttgctggcggttacgttggcagaactgaccactgaggacgtgacgtcactgttagctcttttccatcttggtttcacgaaacacaagagcatattccgtatcggcaccgttaaaatggtgaataagaagccaaccaagaaaaaggtcgctggcaagaaggttgccgctgcacctctagctgtcaaaaaggttgaggttaagaaagtggtcaatccacttttcgagaagcgcgtcaagaactacgggatcggtcagaatgtgcagcccaagcgtgatctgtcccgtttcgtacgctggccaaaatacattcgcattcagcgtcataaggctgtgctgcagaagcgtctgaagatcccgccgccaatcaaccagttctcgcaggctctggataagcacactgctcagcagttgttcaagctcttggagaagtaccgcccggagaacccgatcgccaagatccagcgcctgaaggccaaggctgaagccaaggctgctggcaaggaagttccccccagcaagaagactaatcagctgcgccagggagtcaacaccgttgtcaagctagtggagcagaagaaggcccagttggtcgtcatttcccacgatgttgatccaattgagttggtcgtctacctgccagccctgtgccgcaagatgggcatcccgtactgcatcatcaagagcaagtcccgcctgggaacgttggtgtaccgcaagacctgcacctgtgtggccctgacccaggttgacaactcggaccgcgccaatctgtccaagctggtcgaaaccatcaagaccaacttcaacgatcggtacgaggagatccgcaagcactggggcggtggtctgctgggacccaagagcatggcccgtattgccaagctcgagaaggccaaggcgcgtgagctgacccagaagacggtgtaagaggagtctttcctatacctgctaggtgtataatcttgtgtaaggaattctttcgttgctgagagaagagagcggagagagagaataaaaaaaagcttaaaagtaagtcgttagttatttta

SEQ ID NO: 1739 - DNA, 164 bp, Aedes aegypti
atacttacctggcataggggttaccgtgatcactaaggcggttcccccagggcgaggcccttccattgcacttcggttgggttgacccctgcgattatccctcatgtggataactcgtatgtgtaatttttggtagccgggacgtgcgtgcgcgcacatcccga

SEQ ID NO: 1740 - DNA, 164 bp, Aedes aegypti
atacttacctggtataggggttaccgtgatcacgaaggcggttcccccagggtgagacccttccattgcacttcggttgggttgacccctgcgattatccctcatgtggataactcgtatacgcaatttttggtagccgggacgtgcgtacgcgcacatcccga

SEQ ID NO: 1741 - DNA, 695 bp, Aedes aegypti
cgagccttttctacacttccgtttctccaaagcaaaacagagaaattttaagctagcagaatggctccccgtaagaacaaaaccgtaaaggaagaggtgcaggtctcgctcggtccccaggtccgcgagggtgagatcgtcttcggagtggctcacatctacgccagcttcaacgacaccttcgtccatgtcacggatctgtccggcaaggaaaccatctcccgcgtcaccggaggaatgaaggtcaaggccgatcgtgacgaggcttcgccctacgccgctatgttggccgctcaggacgtcgccgagaagtgcaagtccctgggaatcaccgccctgcacatcaagctgcgcgccaccggtggtaaccgcaccaagaccccgggacccggtgcccagtccgccctgcgcgctctggcccgttcgtcgatgaagattggccgcatcgaggacgtgaccccaatcccatcggattccacccgccggaagggaggtcgccgcggtcgtcgtctgtaaggcatacaccctggcgtggttccttttccttgttttttgggggttttcgcattagaagaaggcaaacatcagctgctactactgctgctcatgcaggagaactatttcgaatgtgcgaaaaagtgcggagattgttcgtattgaatgaataaattcggataatatgaaaaactaaagcc

SEQ ID NO: 1742 - DNA, 631 bp, Aedes aegypti
ggaaggacgtgacgtcaccgatttcttttcctcacgttttcgtagtgaacgacagcagcgaaacttgaatcaaaatgggtcgtgttcgtacaaagaccgtcaagaaggcctctaaggtcattattgagaaatactacacccggttgacgatggatttccacacgaacaagcggatcgtcgaagaagtggccatcattccaacgaagcccctgcgcaataagatcgctggtttcgtgacacatctgatgaagcgcctgcgccactcccaggtccgtggtatctccatcaagctgcaggaggaggaacgtgagcgcagagacaactacgtgccggaagtgtccgccctggagcaggacatcatcgaagtcgacccggagaccaaggagatgttgaagcagctggacttcaacaacatcgttgtccaggtcaccaacccatcggcacagggctacagccgccggaactaagtctactaaagtatcacgtcctggtcctggtgcagttgggatgttgttctagaatttcccacaccggaacatccatggttgggtttgcgagagtgtatcgtataagtaaaagaatatgatcctttggaagttaaggaaagataaacgataacaaggtaatcgaa

SEQ ID NO: 1743 - DNA, 498 bp, Aedes aegypti
atgccaccaaagttcgaccccaatgaaattaagcacgtctacctgagatgtgtcggtggagaagtcggcgccacttcatctttggcccccaaaatcggtccacttggtctgtcccccaagaagatcggtgacgacattgccaaggccactggagactggaagggtctgaagatcaccgtgtgcttgaccatccagaaccgacaggctgccatctcggttgtcccatcggctgcttccctgatcgtaaaggccttgaaggaaccaccacgcgatcgtaagaaggtcaagaacatcaagcacaacggtaacatcaccttcgatgaagttatcagcattgcccgagtgatgcgaccccgctcgatggctcgcgaactgtccggtacctgcaaggaagtgctgggtacggcccacagtgtcggctgcacgatcgatggccgttcaccatctgacgtcattgacgacatcaacagtggagcgattgaatgtcctgctgagtga

SEQ ID NO: 1744 - DNA, 682 bp, Aedes aegypti
aacctggtgctgtcaaagtccttttccgtttcctctttcatgaaacgcagtcaaaatgaaagctaaaggagtgctgaaggaataccaggtcatcgggcgtaagctgccctcggagaaggatccgaaccctccgctgttcaagatgcacatcttcgcaccggaccagatcgtggccaagtcccgcttctggtacttcctgcggcagctgcgtaagttcaagaaggccaccggagagatcgtttcggtcaagcgcatcctggagaagactccgctgcgcgtcaagaactttggcatctggctgcgctacgactcgcgctccggtacgcacaacatgtaccgcgagtaccgtgatctgaccgttggcggtgccgtcactcagtgctacagcgacatggcctcgcgtcaccgtgcccgtgcccactccatccagatcatcaaggtcgaatcggtggaagcctccaagacccgtcgtgctcacatcaagcagttccacgactcgaagatccgcttcccgctggtgcaaagataccatcacaagcgctaccggaagctgttctctttccgccgaccggacacctactatcagtaaagaattcggagccgccgttcattgtactgttaattccactctttttagggagtaaaaaaatgatgaagatccgtaagaaatactgtacctaag

SEQ ID NO: 1745 - DNA, 634 bp, Aedes aegypti
gaaatctctcaacataaccttttccttgttattcgtgaagttgacacatttggtgcgctcacaatacaataagctatcaaaatgaccaactcgaagggttatcgtcgtggtaccagggacatgttctcccgccccttcaggaagcacggaaccatccccctgtctacctacctgaaggtctacaaagccggagactacgtggacattaagggacacggtgccgtccacaagggtatgccctacaaggcatatcacggcaagactggccgcgtatacaacgtcaccaagcacgctctcggtgtcatcgtgaacaagcgtgtccgcggaaagatcctagccaagcgcatcaacgtccgcatcgagcatgtgaagccatcgcgctgccgtgaggatttcctgcgccgcgtcaaggaaaacgacgccgcccgccacgagctgaagacgaagaacccgaaggccaagatctgcttgaagcgcaagccacaagcacctcgcggcgagcaggtcatcgtgaacccaccggagcctgtcttcctggctccgatcccgtatgagttcgtagcataagaaggataaacttgggacggcgacggggagtgtacatctttaataaaacagtttaatttaaaggtaa

SEQ ID NO: 1746 - DNA, 555 bp, Aedes aegypti
aaaattgaacggacggctttctttttcgtccaacttttgtaaagcaacgtcatggctccagtgaaagccgtcgcgtctgtcaagacgaaacccggcaaagatgccaagggtggcaagcagaccaagaaacaactcctgcgaggcaagaacgcccagaagaaaaagaaggagcacttgcgtttcggagtcgactgcaccaacatcgccgaggataacattatggatgttgctgactttgaaaagtacctgaaggaacgcttcaaggtcaacggcaagaccggcaacctcggaaacagtgtgtcgttcgagcgccagaagatgaaagtctacgtcaactctgacgtgcagtactccaagcgctacctgaaatacttgaccaagaagtatttgaagaagaacagcctgcgtgattggattcgtgttgtgtccaacgataaggatctgtacgaactgcgctacttcagaatcagttccaacgatgatgaagaggaagataacgagtaagctttcggaatacatgttaatggcttcgctttaggaagccaaaactaattg

SEQ ID NO: 1747 - DNA, 704 bp, Aedes aegypti
cagccctctttccttccgacatcttgaactacgtgaaacacgcgtttttcgggtgtagaaataattcaaccaagatgaagctgaacaaaaatgtttcctcgtctcgccgcaagagccgtaagcgacatttccaggccccgtcgcacatccgcaggaagctgatgtcggcgcccctgtccaaggaactgaagcaaaagtacactgtccggtcgatgccaatccgcaaggatgatgaagtgcaggtcgtccggggacactacaagggcaaccaggtcggtaaggtggtccaggtgtaccgtaagaagttcgtcgtctacattgaacggattcagcgcgaaaaggccaacggaacgaacgtctatgtcggtgttcatccttccaagtgcttgatcgtgaagctgaagatggacaaggaccggaagaagatcctggatcgccgtgccgctggacgtcgcgctgctctgtccaaggagaagggcaaatacaccgaggagagcgccgctgcttccgccatggaaaccagctcgtaaagtttccccagggaaaagaccctttggccaccacctacaaaggaactgggacagttcgtttcattcgtacaaaggaaatgaaccgtcgaagactgtttgttgcatacagttgtggaagtgtaaacaataaaataccgaataaattgtaagagaggaaaaatacttggaagatgt

SEQ ID NO: 1748 - DNA, 632 bp, Aedes aegypti
gcgttctttcgtttccggcatctcgtactgcttaggaacacattttgattaattaaaggcttttagtcttttaattatccacacaatggccaagaccaagacggagaaaaaggcgaaatccgccatcaacgaagtggtgacccgcgaatgcaccatcaacctgaaccgtcgcctgcacaaggttggttacaagaagcgcgctccgcgtgccgtcaagattgtccgcaagttcgccgagaaggagatgggaaccaatgacgtgcgaattgacacccgcctgaacaaggctctgtggcaccgcggaatccggaacccacctttccgcatccgtgtgcgtctgtcccgccgccgcaacgacgatgaggattcgcccaacaagctgtacaccctggtcacctacgtgccagtgtccacattcaaggaactgcagacggagaacgttgaatcgaccgaggattagatgctgtaaatttacttacaacaaaacactacctacccctattcagatagaataagtcggatggttcaacttgttgcgtttttgtgagttggaatgaaggaggaaaaaaatcagtggagagcagaagtgaagaaaaatacaagaaaagcccaggtggaaaaaattgaaaacc

SEQ ID NO: 1749 - DNA, 512 bp, Aedes aegypti
tttgacagttcttgtttcctgcgctctcttttcgtttgtgactgaatcgacgagaacatcaaaatggtcaacgtacccaagcagcgtcgtacctactgcaagaagtgcaaggtgcaccgcgtccacaaggtcacgcagtacaagaagtccaaggaacgtcaagcttcgcagggtcgtcgccgttacgatcgtaaacagaagggtttcggagggcaaaccaagcccatcttcagaaagaaggccaagaccacgaagaaaatcgtgctgcgtatggaatgcgtcgactgcaagtaccgcaagcagaccccgctgaagcgctgtaagcacttcgaactgggaggcgacaagaagcgaaagggacagatgattcagttctaagctgctcgtgtatttccaatctttaaggaactcatgtaaaataaacccgctgaatacaaaagtgggctgaaaagccaactgaaggaacccggattccaggtttcggaagtgaccaaaaaaaaaaaactctctct

SEQ ID NO: 1750 - DNA, 1087 bp, Aedes aegypti
ccttgttttcgacatttgctcgcttcgatctttctttccggctcgtaccagagtctagtgaacacacattttgtgtatcattaaaattaatttttaagcccttaaaacgccacaatggggcgtgtcattcgtgcacagcgtaaaggtgccgggtccgtcttcactgcccacaccaagaagcgaaagggagagccaaaattgcgcgccctcgattatgccgaacgtcacggatacctgaagggaaccgtcaagcaaatcatccatgatccaggtcgtggtgccccgctggcggttgtccacttccgtgatccctacaagttcaagctgcgcaagcagttgttcattgccgccgaaggtatgtacaccggacagtttgtgtactgcggaaagcgcgcccagctccagatcggaaacgttctgccaatcggtctgatgccggaaggtaccattgtgtgcaacctggaggagaagaccggtgaccgtggcaagctggcccgtacctcgggtaactacgcttccgtcattgcccacaatccggataccaagcgtacccgtgtcaagctgccctcgggtgccaagaaggtcctgccatcggccaaccgtgccatggttggtattgttgctggcggtggtcgtatcgacaagcctatcctgaaggctggtcgtgcctaccacaagtacaaggtgaagcgtaactgctggccaaaggtacgtggtgttgctatgaaccccgttgagcatccccacggtggtggtaaccatcagcatatcggtaaggcctcgaccgttaagcgaggaactccaccaggtcgcaaggtcggtcttattgctgcccgtcgtaccggtcgtatccgaggtggcaagggagacgagaagttcaaggagaaggagaagaagtaaggcgctagaagcgacggaagaagacggattgcatcctaagttgctgttttgtgtactgataagcgtaaggatcgatatcgttctgctgttctggaattaacacgcggggtgacgaaagtaggaacgagcgaaggaataatatggaatggttggtaaataaacaagaaaataccaaaaaaataattaa

SEQ ID NO: 1751 - DNA, 984 bp, Aedes aegypti
gttaagttaaacgagtgaaaatagcgttgtgcttccgccggtaaagaggattatgctgaaagtgggcgaaatagttggataaatacgtgaaaaccgaacgtcaacaacactctgagccaatgttcggttgtgatgatgtcttctgcttagcgccagagaaattgatttcggaacggcatctttggttatgttgtgatgggatttcttcccggaatagtgccatttaccggtggaagcgcacactcgtttaggaaacgtttcattcgagcgctagttgagtgacaacattctgtgtttttgtttccggttccagattagaccacaatgagaacgatcaactcaaatcagacggtcaccatcccgaagggcgtttcggccaaggtccatgcccgcgtcgtgacggtttacgggccccgcggaaagctgtccaagagcttccgccacctggccatggacatctacaaggtgtcgaagaagaagctgatggtggagaagtggttcggagcgaagaaggaaatcgctgctgttcgcactgtctgctcgcacatcgagaacatgatcaagggagtcaccaagggattccagtacaagatgcgtgccgtacatgcccatttccccatcaactgtgtcatcagcgagaacaacagcctggtggagatccgtaatttcctcggagagaagcacatccgccgcgtccggatgcagcccggagtgaccgttgtgaactcggccaagcaaaaggacgaactgatcctggagggtaacgacatcgaggccgtttccctgtccgccgcgctcatccagcagtcgaccaccgtccgaaacaaggatatccgtaagttcttggacggtctgtacgtgtcggagaagaccactgtggtgcaggatgaggaataaggagatgcgcgtaaataatgtttttcttgtaataaggatatggaagagcaggagtggaagaaaatgaaggttcgaaagatgaaaaaa

SEQ ID NO: 1752 - DNA, 619 bp, Aedes aegypti
actgacttgaagctctttttcaccgaaacacatctcggaagagacacgttgggaaagaactgatccaagatgcagatcttcgtcaagacccttacgggcaagaccatcacccttgaggtcgagccatcggacacgatcgaaaatgtgaaggccaagatccaggacaaggaaggaattcccccagatcagcagcgtttgatcttcgccggaaagcagctggaagatggccgcaccctgtccgactacaacatccagaaggaatccactctccatctggtgctgcgtcttcgtggtggtattattgagccatctctgcgtattttggcccagaagtacaactgcgacaaaatgatctgccgcaagtgctatgcccgccttcacccaagggccaccaattgccgcaagaagaagtgtggccacaccaacaatctgcgcccgaagaagaagctgaagtaagccattcttgggaggtgtttcacttcaatttccccccgttccaagacctgggattccgtgtttaaaatgtaagctggatttgtgaacaagtgaattgaagttgtcacaatgcattactataaaataaaacaaacaaaaaaatgttaaaaactcggatataaat

SEQ ID NO: 1753 - DNA, 2583 bp, Aedes aegypti
atgtctgaccgttactctcaagggcgctaccgtgcgcgtggttacacagaagtggggtcgccccacgaaggccgtggaagtccttcttctcgcccagcctacagttcgcgcgatgaaggtcgatcgagggaaccgagagaacaccaccgtgaatcatcggcaggtggccgtgaacggtccggaaacggtaatggaggagatcgtcctggtggtgaacgcggcgaacgacgccaacgcagtcgccgtggcgttggagatacgctccgtacccgtgctctggatgctccatcgaagcatggtaccacgggtcaggctctccagctgaacagtaactatttcaaactgttgaaacacatcgagtggactctgtaccagtatcggttggacttctccccgcaatgcgccagcatgcgtctcatgcagggattggtcaacgaacacaagaaaatcttcggaggattcctgtttgacggaactcaactgttcatggtcaacaaattgagaagcgatcaactgacattgcaatccagacacgaacgtactggagatgtctaccagctgcgcattgtccatacgggctccgtggatatgaccaacgaagccggtatccaagtgctgaatttgattttgcgtcgcgctatggcgggtttgaatcttcagctggtcggtcgtaacttgtacgacgcggctgccaagatcgccattcgtgagtatcaaatcgaactctggccaggttacattaccagtattcgtcagcatgaacaggacattctggtgtgttgcgaaattgcacataaaactatgcgtatgcagacatgctacgacatcttgcgcgattgtcagaagcacgatcgtaactacaaggattcgttcaaacgtgccgtacttggtgtcgttgtactgaccggttacaacaataaaacctataccattcacgacgtcacgtttgaaaccactccggagagtacgttcgataccaaggccggtaaaacgtccttcattgagtattacaaacagaagtacaacattcgcattcgtgatccacatcagcctatgttgctgtcgcgagccaagaaacgcgatctgcgcgctggaggcagcgaactcatggccctcgttccagaactgtgccagatgacgggtttgaccgatcaaatgagatctgatttcagaatgatgcgtgccatggccgatcacactcgtctcaacccggatcgacgtattgaacgattggagacgttcaaccgtcggttgcaaacgtcgccagagagtatggaagtcttcaagacctggcagatggagcttgaccgacgtcttatcgatcttcctggacgattgttaccacaggaaatgatcttcttctccaccacagccaatggcgtacaggctggagaacaggcagattggacggcccatttccgtaacaatcccatgttcgctacggtgcggttgacgcgatggtatttgatcgtaccgaaccgggcttcacgtgaggccaacgatttcctgggctgcatgattcaagccgcacgcggtatgcgatttgagattagtaactgtgaggtggtcaccattccggacgacaacccaggtacctatgtgcgaacattggacaatctgctgaataaggacccgcagttggtgatgtgcgtcgtgaccaacaataaggccgatcggtacaccgccatcaagaagaaatgttgcgttgatcgtgccatcccaacgcaagtcatggtacaaaaaacgatcacaccaaagggtggtaatgtacgaacactcatgtccgtggctacaaaggttgtcatccaaatgaactgcaaactgggcggtgttccatggaaggtcaagatcccactcaacggtttgatgaccattgggttcgacgtttgccatgatggaaaggacaagtccaaatccttcggagccatggttgccacgttagatcacgataacaagggtactccgaaattcttctcgactgtgagtcagcacacgcacggtgaagaaatttccaattatctgcccatcaatacggtcaaggcattgaacgaatatcgtaaggaattcggagagctgcccaaacgtatcatcttctaccgagacggtgtcggcgagggtcaacttcactacgtgtacgagcatgaagttaaatccatcgttgagaagctgaaccagatctacaaatccgctggaatcgatcaggatgtgttgctcaccttcttcattgtgaacaaacgaatcaacacacgcttcttcgaccatcgtcagaatcccagacccggaacagtggtcgatgatgtcgtcaccctaccagaaagaactgatttctaccttgtgtcgcaatcggtccgtcaaggtacggtttcgccaacggcgtacaacgtgatctacgatacatcaggcctgaagatcgatcacctgcagatgctgtcgtacaagcagtgtcacttgtactacaactggtccggaacgactcgtgtccccgcggtatgccagtatgcacacaagctgtccttcctggtggcgcagttccttcaccaggcaccgagcaatctgcttgaaaagaagctgtacttcttgtaa

SEQ ID NO: 1754 - DNA, 586 bp, Aedes aegypti
atgtgtttgcaaatatgtttggctgctggtctgaccaagggattcgcccagaccgtcggaatcgctgtcgatccccgccgtcagaacaagtccgtcgaaagccgccagcagaacatccagcgcctgaaggaataccgcagcaagctgatcctgttcccgatccacgagaagaagaagctgcgcaagggcgaggccaccgaggaggaacgcaagctggccacccagctgcgcggaccggtgatgccaattgtgaacgagaagccagaggttgagttccgtgcgatcaccgagaaggagaagaagttctctgccttccttgctgttcgccaggctcgtctccatgcccgtcacttcggtgcccgcgccaagaaggcaaaggaagccacggaacaggagagcaatgcccccggtgccgacaagaagaagaagtaaacggcttgttgaggacagccgtctagtttagccggtttgtacaattttacggattattattttctcgtgtatgtaagtgaaaatggggaaaaatgagcgaaaataagtggagtaataaaaccctattggataagatgttccaattccaactatg

SEQ ID NO: 1755 - DNA, 240 bp, Aedes aegypti
atacaaaaaagcgcccacctttgcctttggttggagacgcgtggaatcgactgccgccctgaggaattggagtcctcttccgctggtgtggcacctcttctggaagccggttcccgccgtatgaatttggagaagtgtgaagtgtgtgttaatattggaccattcggagaaaatatagataccacgtcaccccccgccggatgttctttcggtgaagcgactgaagctgacgggcgatga

SEQ ID NO: 1756 - DNA, 411 bp, Aedes aegypti
atggcccgtacaaaacaaaccgctcgtaaatctaccggaggaaaggctccgcgtaaacagctggccaccaaggccgcccgtaaaagtgccccatctaccggtggagtcaagaagccccatcgttaccggccgggaacagtggccctgcgagaaatccgtcgctaccagaagtccaccgagttgctcatccgcaagctgccgttccagcgtttggtccgtgaaattgcgcaggacttcaagacggatctgcgcttccaaagtgctgccgtggccgccctgcaggaagccagtgaggcctatctggtgggattgttcgaggataccaatctgtgtgcgatccacgccaagcgcgtcaccatcatgcccaaggacatccagctggccagacgcatccgtggagagcgtgcctaa

SEQ ID NO: 1757 - DNA, 252 bp, Aedes aegypti
atggagaacgacgccggagaattcgttgacttgtactgcccaaggaagtgctcgtccagcaaccgaatcatccacgccaaggatcatgcctccatccagatcaacatcgtcgatgtgaacccggcgactggacgtatgctggaaacctccaaggtgtacgccatctgcggtgagatccgtcgtatgggagagtcggacgattgcatcgttcgccttgccaagaaggatgggcttttgactaagaactattaa

SEQ ID NO: 1758 - DNA, 346 bp, Aedes aegypti
acattcattcatttggtgtgccatcgcttgcggcagacatcccctagtttccattacgtacgtcggatcgaattattccgctcgaaaatgactgcctggagagccgctggtttgaactacatcaactactccaacattgctgcccgtctggttcgcaaggctctgaagccggaacagcgagctcaagccgttcggcgagacgagtcccacatcaagttcaccaaatgggtcaacggaaagccagaaaaggctggtgaagttgtttagattcggaattaggtcgtctgtaactgattcggttcaatgttaataaaaagtcaagattctacgatgaagaaaaggtaaa

SEQ ID NO: 1759 - DNA, 496 bp, Aedes aegypti
ctgaagttctgtttctgctaaagcagtaatctcccaacacaatggccaagtccaagaatcacaccaatcacaaccagaaccaaaaggcccacaagaatggcatcaccaagccaaaacgccagcgtaatgaatcgacccgtggtgtaagtattatatcggtagcttgtcctttaaaccggtatccaaacgtttggccctatttacagatgtgccagaagttcctgcacaacctgcgattctccaagaagggcaatctgtcccgcgaggaatccctgaagcgcgccgaggaacgcaaggccaagtttgtcggacagcccgctccggttaagctgtaagctgtttcctcttgatgggtggaagcttctttttgatccgtgatcaacaattattattaactagtgcgtttggatcgtatttccgaaacagtgcggttgatgagtacaagtgagcataataagttcaatgcggaataaaaaatcagttggaaattgaaaaa

SEQ ID NO: 1760 - DNA, 951 bp, Aedes aegypti
gcgaaataaagttagtctctttgttcattccaccggatcaacagctcatcccctcagaaataagcgctcgtgaaacgaaaactccgtagccatggatgatgagaaagcatcagccagagtggtggtgaaaaatacccgcggagcggagccgctagacattgtcgatgacttccagcgacgcaagctggtgctgaacaagcactgggttcgcccgaaattcctccagtacaactacatgtacaactaccgccagaactactatgatgacgtcatagattacctggacagacgggctcgcggaatgcccggtgatattccacgtccacagtactgggccgaacgtgtcctgcgaactgagaggaaaacgccaaagagcatcgacgaaatgtacaactacaccaacatcggattgaagcgggatgacaagaagcttatgtacactctaagtagaagacaacctctaagatcttacaccgtctaccgagtttggtggtagagaaaatggtgatcaccatgtgcttaccgaacaacatcgtccagaacatccggaccttcaacatctatcgaaaccaatcaccattttccgcgcttccaaactacaagaacaaagacaacttcaaaccgcaagcaccacaaacagcgatggcaacttttatcatccacatacatgaagcataaataataaaccgaagccaatgatctttatattgcagtttatgtttaagggactacctcccacaccgtaaaccttggagctaatgaaatctctactatatcttcatttattttatttttttatttgaaacccaataaaactactctaccgaataaaaagtatcctagaactttgtagaatttgtttttatatccactcacaagagtttatagtttattttaattgcgcaagattaactgaaagaataaagtaaccgatgaagagagaaatgattc

SEQ ID NO: 1761 - DNA, 374 bp, Aedes aegypti
ctttctgatccgccattgtgtcaagtttgttgtccgacgatttgctctgacctaaaaatcaccaaaaatggagaacgacgccggagaattcgttgacttgtactgcccaaggaagtgctcgtccagcaaccgaatcatccacgccaaggatcatgcctccatccagatcaacatcgtcgatgtgaacccggcgactggccgtatgctggaaacctccaaggtgtacgccatctgcggtgagatccgtcgtatgggagagtcggacgattgcatcgttcgccttgccaagaaggatgggcttttgactaagaactattaatttcaatgtatcctaagggtaaacaatgaaaactccgtaattaaaaaaaacgtac

SEQ ID NO: 1762 - DNA, 481 bp, Aedes aegypti
gctgtgtctttctttctcgggttgtgctaaacgtcaacagcacacacgttccgatcgcggagaatatttttacgattttcgtctaaaatacccatcgcaagatgccgcaggaaatcaaggaagtgaaagacttcctcatcaaggctcgccggaaggatgcccgtgccgtcaagataaagaagaacgaaaacaacaccaagttcaagatccgctgctcccggtatctgtacacgctggtcgtccaggacaaggagaaggccgaaaagctgaagcagtccctgccaccgggtctgcaggtcaaggaagtcaagtaagctcgttccgttccatggatcggagtttgcttttcttcatgggggaaattctgggcgccgcggaaactgatttggtctgaatggaagtgctgaatccgctaactaatttaattccataataaaagaaagttaatcaggatatcgtcacctggaaggtaaagtttatt

SEQ ID NO: 1763 - DNA, 306 bp, Aedes aegypti
aagtgttccaggagctggattctgccggccaaccggtgttcaagtgttgtgaagttcgtggaagacccagtcacccgtccgggcggtttccgagtgtgctggtcatttggagagatttgcggtcggtctaagccacctacgcctgaagaactccacccagtccgggccttcaaactttccacaaaatggtcgtcggaaccgtcctccaaaaggaacgaattgggagtccgtccaagcagcatcgagcgccggttgaagcaacgccccgacgatgatcctgtaacaggtgtgtcctacccaaaataa

SEQ ID NO: 1764 - DNA, 165 bp, Aedes aegypti
atgaggattccactgggcccgaaacaagccgaacaggccaccaaatggatctcttccgcgatgggattcggaggagctgctgccttgttcggatgctatctgaccgactggagggtgatcgtcacctatatcccgttctacggtggcaaattcgacgaaaagtag

SEQ ID NO: 1765 - DNA, 381 bp, Aedes aegypti
atgttcaaagcattagttatcctagcaattgcagcacttgccgctgcggagtatcatgaagaacattattcccatcccaaatataagttcgaatatggagtagaggatcaccacacgggagacaacaaggatcagtgggaacatcgggatggggatgtcgtgaaaggccagtactccctgtacgaacctgatggaacgaaacgcatcgtggaatacacctccgataagcaccatggattccaagctcatgtgaagcgagttggacacgctcatcatccacagatctatggccacgaggagggacatcattattccggaaacgaacttggtcatggtcatggccacgccagcagttatgctaatctataccaacatcattga

SEQ ID NO: 1766 - DNA, 789 bp, Aedes aegypti
atcagtttgcgatcgttttgattctggtgcagtcagtgagcagtattcgaaaatgctgaaaattgttctaatcgtcagtgtggccgtagtagccgtctcagctcaatatttcggtggtgaagcaattggtctaggagaggaaggtggttacggtggaggtgaagaagaacacggggattactatgcccacccgaagtacaagtttgagtacggagtgcaggatcacaagaccggtgaccacaagagtcactgggaaattcgtgatggcgatgtagttaagggtcaatactcgctgcacgaacccgacggcacggaacgtgtggtcgagtacaaatcggacaagcattcgggattcgaagctcacgtcaagcgggtaggacacgggcatcatccgcagctatacagtggagcccatcatgaggaaggcggtcacggcgattatgaacatgatcatgccttcagctacaacaaccaaaatcatcaccatctgtgagtgccccccagcggcagtgcagcatagtgatgagtatggttgacgatccagaacccagccatattatccttacgagtaactattcgagactgaaaaccaaatactccttcaacgagaacgtgcctgccgatccggcgcactggtgcgttggaaatattaacagcttcttcctatctgttgtttcagctgtcgactgtttaagtttaaaaagcccctcaataaaaatgcgaatcgaaaatcaattacggagaatgtttgattagtacctaaagcaattgtgaaagttctagatatcg

SEQ ID NO: 1767 - DNA, 1078 bp, Aedes aegypti
ctgttcttttcaaccaagttctctccgacgtatgttgtgtcgataaataaactatcgaggtaaaatcggtttttcgcgacggattccgcggcgaatcagtgaaaatttgtcctgggtgaacgctgttatcgtttggcagcagaaagaggagaggaacgtgaccagcagtgtcggaaaagtgttttaaattcgggatcggaagttcggtgatgcctgtcgtctgcttgatgctgttatcctcttctctgcgagctgtcaaaaattcgctttgttcgtccgcggaaccgtggacataaccttcaccactaagtggccaatctccggggaaagccgtaagtgattaatccgtgcctttcctgtttccattttaggaagaatggtccgcattagtgtgctagccgatgcgctcaagtgcatcaacaatgccgagaagcgtggaaaacgccaggtcctgatccggcccaacagtaaagtcgtgatcaagttcctgaccgtgatgatgaagcatggctacatcggagagttcgaaatcgtcgacgatcaccgatccggcaaggtcgtggtaaatctgaccggacgcctcaacaaggccggcatcatctcgccccggttcgacgtgaagatggacgatatcgaacggtggaccaatacgctgctcccctcgcgtcagttcggatatgtcgtgctgacgaccagcggtggcatcatggatcacgaagaagccagacggaagcatctgggaggcaagattctaggttacttcttctaagtttgctgggcgacaaaacattactaccaagagtaacttctaattaaaaaaacaaaaatcaacatccgtcagtccaaattccaatcactcgcgggagatttttcttttctttttttctctcgtgctaaggccacaaagaagcgttaaagttggtaaaccaccatgcctcgctagccgggggtgtgtttaccggcaaaaaaaggaaaaaaaaggaagcggttaggtgtgttttatatgaatgcattaatataatgtgaagtttcacctcaagggaaagtgaaaaaattaaaagaaaaatcgaatccgtac

SEQ ID NO: 1768 - DNA, 1123 bp, Aedes aegypti
attgtacagttgaatcttgagttcagcggttgatagaagaaacaaatcagacaccatggttgacgctgccgttatggaaaagatggaagctggcttcgccaagctggccgcctcggactccaagtccctgctgaagaagtatctgaccaaggaagtcttcgacgctctgaagaacaagaagacctcgttcggatccaccctgctggactgcgtccaatctggtttcgagaaccacgattccggcgttggcatctacgctcccgatgctgaggcatactccgtgttctcggatttgttcgaccccatcatcgaggactaccacaagggcttcaagaagaccgacaagcacccagccgccgacttcggtgatgttgcctcgttcggcaatgttgaccccactggcgagttcgtcgtgtcgacccgtgtccgttgcggtcgctcgatggagggctaccccttcaacccgtgcctgaccgaggcccagtacaaggagatggaagacaaggtttcctccaccctgtccgccctggaaggtgagctgaagggcaagttctacccattgaccggtatggacaaggccgtccagcagcagctgatcgacgatcacttcctgttcaaggagggcgatcgcttcctgcaggccgccaacgcttgccgtttctggccaactggacgtggtatctaccacaacgacaacaagaccttcctggtctggtgcaatgaggaagatcacctccgcatcatctccatgcagatgggtggcgatctgggacaggtctaccgtcgtctggtcaccgccgtcaacgacatcgagaagcgcatcccattctcgcaccacgaccgtctcggtttcctgaccttctgcccaaccaacctgggaaccaccatccgcgcctcggtccacatcaaggtcccgaaattggccaaggactacgccaagctggaatccatcgccgacaagtacaacctgcaggtccgtggcacccgcggcgaacactccgaagccgagggcggtatctatgacatctccaacaagcgccgcatgggtctgaccgagtaccaggccgtcaaggagatgtacgatggcatttctgaactcatcaagattgaaaagtcgctgtaa

SEQ ID NO: 1769 - DNA, 273 bp, Aedes aegypti
atgttctcctcgcactccaaactaggaagaaaccgtgtagatcacagtttcgcttcagctgagctgcctggcagacgacaattcgaccatccccttctccaacaaacctctgcacttccgggcaggccgagacccagagtgatcccgatcaatcgtctcactcgatttgcggcagcggctgcctcggccaacgagaagcagcctccgagccaatgcaaatcgatcgatgacgacgcagggtacctccatttcatcccacattcttttgtgtaa

SEQ ID NO: 1770 - DNA, 1255 bp, Aedes aegypti
cgcgaatttgtggttggtggtgtgttcatcagtgcttgaggttgtgtttcgcacaaattagtgacggagtgttttacagttttggcagaaattcacagaattaagagaaacaaaacagtcctataccgttggttgtgcgctgctgcggagaagttatcgttcaagaaggaattgggttccgcgtttggaagtgattgtgctaactaaatccggtggtgttcagtgaattccggttcacaaccgattttaagattttctcgaaaaacctagaatttttactcaagtttgtactcatcccgctagtcgccatgttcgcgctttggtacttttcgctcgccgtggacgaagtcagaaaacgttttagtttcattgatcgaattcttacgttcttaactggcaagtcagtaacggataagcaaccggcaattgaatcggaaaaacccgaagatactgtatcaactgaatccaatgaatcttccacgcctgacccgattccttacactgacatacctgtcccacccaaggtcagccctgcaccagctccaaaaccaacagaaaaacccgttctcaaaccagctccggcaccaccggctcccaaacctgtcgaacagccaaagattaccgttctcgaacccaaaccaaaagttgaagtcccctcaactcccgaaccaaagcctgaaccaattaagcaatcgaaaccagttccgactcccaaggtagaaccagcacctgtcgccaagcccgccaaacctttggaaccggtcaccaatggtcaaccgaaagcgcccgaaccagccaaggtggcgcccgttgatcttgtgaaactaaccgacgaaagctcgaactcacattcttccgcagcatccatcgggatggaactgatcagcaccaacgaggacagcttcatcattgtcgaaaagcaaaaaccaaagccaaccgacagcaacggtgccactaacaccacaaccaagccggcaacgaacgtgaaaaattcgacccttgattttctgaaagccgaaggtggtggcggatctgctgccgtcgccggtccggctaagccaaggtaggccactgggaaataaaaccgcttgatcttgctgtaaacaacatacatgtctatccctatcgtgtaacaacaacaccttcggagggttttcacaaaagtaactgactgagtcgaactgaatggcaacagctggtcagctcgcgaggttcaactcaatttggtgacaatatggctgtgggccaacgggtg

SEQ ID NO: 1771 - DNA, 461 bp, Aedes aegypti
cctcgaccttccatcatctgtcgtgcgacttcttcagtcttcagaggaaaactcgttgttccttggtgcttattttccaattattcccgagtaagaaaatgcaggctctgcgtccactgaccaatttggctgcccgcaacggcgcctttttcgcccgcagctaccatggcccgagcaacttccgggtgttcaccatgaacgacatgcccgttccggagggtgacttcttcgagcaacaccgccgcaagaaccgtacttacaatgctgtgctggccgccggaatcatcatcttcggaatcaccgcaacgattgccaaggaatccggactgatctacctgaactacagcccaccaaagagcctcgagtaagctggaaggtggatttgtgatagatttgctagcagcaagcgagtgtaattcgaacatgttatgtgtaaaataaacctatgaatggaatatcgc

SEQ ID NO: 1772 - DNA, 3350 bp, Aedes aegypti
gaggcgattttccacaggcaaggcatggcgaacggtcgtgtggtgtggaaaatgtggatttgctctccctcgcttccatatacggtctgactcataacacggacggcggcggcgaacgcgcgatttgacagtgtttgatgctgcgggggatttgctgtggcgtctttctcgggaaggggaagggaggggaggtgggaaaatatgcggtctatttttaaaaatttctgtcttaagacaacagcgcagagcgtagcagcgtagaggttttgctgtgtgtggaagacgtggtggaaattcataattttctctcggttggggtgtgaggtggggcgaggaaggagggcagattgtacaccaacacaatcgaagctcggacggtcggaaagccgaggccactgccgaaggtataaaagtgtcctgtaccggtccggagcgttacagtctcaagtgtagaactcgtggtgaacggaccgtacaacgcgttacctcaaactttgtctccttctcttccggtgaaaggccttagaacaacccccagtcaaaatgtgtgacgatgatgttgctgcgttggtcgttgataacggatccggtatgtgcaaggccggtttcgccggtgatgacgccccacgtgccgtcttcccctcgattgtcggtcgcccccgccaccagggtgtgatggtcggtatgggtcagaaggactcgtacgtcggtgatgaggcccagagcaagcgtggtatcctcaccctgaagtacccgatcgagcacggtatcatcaccaactgggatgatatggagaagatctggcaccacaccttctacaatgagctgcgcgttgccccagaagagcacccagtgctgctgactgaagcccccctgaacccaaaggctaaccgtgagaagatgacccagatcatgtttgagaccttcaactcgccagccatgtacgtcgccatccaggccgtgctgtccctgtatgcttccggtcgtaccaccggtattgtgctcgactccggtgatggtgtctcccacactgtcccaatctatgaaggttatgctctgccccatgccatcctccgtctggacttggctggtcgtgatctgactgactacctgatgaaaatcctcaccgagcgtggctactctttcaccaccactgccgaacgtgaaatcgtccgcgatatcaaggaaaagctgtgctacgtcgctctggacttcgagcaggaaatggccaccgctgctgcctccacctcccttgagaagtcctatgaacttcccgacggtcaggtcatcaccatcggtaacgaacgtttccgctgcccagaagccctgttccagccttccttcctgggtatggaatcttgcggtatccacgaaaccgtctacaactcgatcatgaagtgcgacgtcgatatccgtaaggacctgtacgccaacactgtcatgtccggtggtaccaccatgtacccaggtattgctgatcgtatgcagaaggaaatcactgccctggctccatccaccatcaagatcaagatcattgccccaccagaacgtaaatactccgtctggatcggtggatctatcctggcttccctgtctaccttccagcagatgtggatctccaaggaggaatacgacgaatccggcccaggaatcgttcaccgcaagtgcttctaagaagttcaccccgaactcctccagccactactactactacttcttgtatttatcatccattctatccttacaacaaatacaacatcagcagcaactacaacatcaacagcgatttgatcaacatcaacagcaagaaacgacaacaacaccgacacatcaacaatttacaccgacaaccgctaggaaactgcgaaaacacaaccacaatgataccacaaatatcttcatcgtgtttaagttttgtacggttttttaacttatacgacatcatcgtcagttttattatttttacgaattaccctttagttcttttttattattattataaatgagagaaaaactatttattaaacaaagctattgtaaaaaataataaaaaagatattaaaaaatcgagagaacaccaaaaaactaaaacttccaaaacgggtttttcgcttcaaatcgagaaaaagaaacaagcgcatcgtcatcatgtgaactgaataagatattaaaaagaatgtgtcaaaaagctacgccgaaacttatttttgttacgatataatttaagtatttaataaaattgagacttaaattcgcccgtccagcttctcctttcaatgtccctcgttgctctctcctcggacgatcgacccaatgatctcatcctccaaaaatcctcctctcactgacataatcagctcgatccgaatataacaatcgcgcgtgggactcattacgaaatcctcccccatcaaacaaacgatcgtccgtttcgaaaaaaaaaaaataaaatattttcacgactttccactcaccaagcgtgaatgaattacctcatcgtgataaatccacaccgcgggaagccaaaaatagatcgccgcatatgcgagaacaatttccacgcatttccacacagccgtgagtcgtgttctccatgcacgcacgaaactccctcaccaacatgattatgggagctatttttagtcccgcggttgatccagttttggccaggttcgcctgacgactcacacacaaacgcacatgtgagcacggtgttgtgtcaccgaactgtgagggtgttggaatctgttgaactcggttcgcgcacgactcaccggctacagctccataaatgggcatggaagttgtgcgaagagactcgggttgcgacctgactagctagctagggaatgactcggatcgtgcactgctggtggcagcgaacgaaggctggtggtggaaaatgggtgaagcaaatgagagctcgaagcaaagatcaagaccgtatgcgaaaatttttcttcccgacacgacctcgttagtcaattcggaagcaaaaatttaagcatagagcgaggtagttgagtcatcgctacagtgtgctgtttgtctatagagatgctgtattaggtgctctaaattatgtgatttataattggctcaaatttaaatttgtttagtaccgaatacagaggttcaatcgttaaacattgttttatccattacgttgtatactacacagtattaccaaagttgagttcaataacgaacattgaatttagtagatgagatactggaatacactttaaagtttaaagtatgtgaaaaacctcaacattactttttcttcgtctccaaagtctaaaattaagtgagagcttttttgatataggtactctcgtcagttcaga

SEQ ID NO: 1773 - DNA, 902 bp, Aedes aegypti
caaactcccgatttttgacagcttcgcgtcgtccatcgtaatcttcgcgttcgcgtgcttccgcccaaacgtcaaccatcggagttgtcttcctttccgtcactttagtttgaataaagtagacacattttgtcaagctaactcgccaagatggtccagcgattgactctgagaagacgtctgtcttacaacaccaagtccaacaagcgacgtgttgtccgcacgcccggtggccgtctggtgtacctgtacgtcaagaagcagcgcaccgtgccaaaatgcggccagtgcaaggagaagctgagcggaatcaagccatcccggccgagcgagcgcccacgtatgtgccgccgtctgaagaccgtgacccgaaccttcggtggtgtcctctgccatcgttgtctccgtgaacgcatcgtccgtgcattcctgatcgatgaacagaaggtcgtcaaggtgctgaaggcccaacagctcggcaagcccatcagcaagccaccgaagatccagaagaccccggccaaggccgccagcaagagcaagtaaggcgcttgtgaccgtggttcgagtgtggaagccaagggggagcaggaggaggtgtactatataagaacatgctaatggaaaaaagaataaaatccggttaaaaaaaatttacggaaccatgtcggtaagtttattttgtttagatccgaaagtcgtttctctagctagatttgttgtaatgatttatctatcttctttttctatcaaataaggtgtaaactatgactaaagtcgagtagcaattctttctatctgtgttcaattaaattaatgacgaaataatattgagattatgtactaaattaaagagaccagacgtccctcgtttcgcggaacagcgcaattttcaacatgat

SEQ ID NO: 1774 - DNA, 683 bp, Aedes aegypti
atgctgggtcgattgcaacacgttggaagcttcctccgtcaggcggaacttgtagatcaaatcggccacctcgtcgatgtgcgaatcgtcctccagcttgttggcgtagatgtcgatatcgatggccgaaaccttgttcttctgttggaacttttgctccagctcgtaatagagcgcttcgtggttcaccttggacagaaccggcgttgcgagacctgtttgcgttcctcgacttccgacaagcggagaacgatctcttttccgtcaaattgcactgcggtgaacacatttgaccgagatgtcggcccacaagactttccggatcaagcagaagcttgccaaaaagctgaagcaaaacagacccattccacagtggatcagaatgcgcactggaaacactatccgctacaacgccaagcgccgtcactggagacgtacgaagctgaagctgtaagcgcttcttctgggtctcggccgcggatacgattttctgtttacatccattctgaggagatatcgtggcggagaatgtttgcttcccggctttgctgcttgttccgcccttgcgacatgaattaactttagtggtaaggaaagaaacggtgaattttgtcgtcgtctgaaaaaggtgaataaagtgtgaagtctggaagtggagattctacttaaaaactagcacggaa

SEQ ID NO: 1775 - DNA, 984 bp, Aedes aegypti
gtaaaatcgacctttcactgtaccgaacgcgcccccatcggacagctgtcagtaaacgcaaactcgctcgaacttccgcccaactgtctgtggtcggctgttctgtcaaaatttgctcctttctcgctctttttccgggcatctttgatgtgcgagtgaacacatttcactgtgaacgtaaaataaattcgctatggttttcggatcaaaggtgatcaaggccggtggcgccgagcctgatgctttcgagggacaaatcggccaggctatcctggagttggagatgaactcggacctgaagccacagctgcgtgatctgtacatcacccgcgctcgtgagatcgagttcaacagcaagaaggctatcgtgatctacgtcccggtgcccaagcagaaggccttccagaaggtccaaacccggctggtccgtgagctggagaagaagttctccggcaagcacgtcgtgttcatcggcgagcgtcgcatcctgcccaagccccagcgcggccgccgtgaccccaacaagcagaagcgtccacgatcccgcactctgaccgccgtctacgatgccatcctggaggatctggtcttcccggctgaagtcgtcggcaagcgtatgcgcgtcaagctggacggatcgcagctgatcaaggtgcacctggacaagaaccagcagaccaccattgaacacaaggtcgacaccttcacgtcagtgtacaagaagctgaccggacgtgacgttacgttcgaattcccggagccctacctataaactattacaaccaatagttgctagaaattaatctaataagtgagcgcgcgcggaaggttggtaaaactgaagaaaaaaaactatgtacggaactagggtgtgcataaatcatctttgtgctgcatcgttcgccccctttaaataaagaccctcaccaaacggagggacaagaacagtttacaggtgtattggaaaacaatttctaacagttg

SEQ ID NO: 1776 - DNA, 967 bp, Aedes aegypti
aatatttctattctgtgtactcttcgtgcttatttccattttctctgtgcctacttctggcgccatctgttgccaaaattcaaactacccattttgctgagccccccgttctgtcaaattgatcgcgctatcttgaaaccggtgcgcgttttcttgccgccgcgaaacggaagtgtgaaagtgatttcgactttgatgtctctttttatttgtgactgtgaaagatgccaggcttgtcggaaaagccaatcctaatcgacggtcgcggccatctgttgggccgtttggcctcggtcattgccaagcagatcctgaatggccgcaaggtagtggtcgtgcgctgcgaggatttgcagctgtcaggacacttcttccggaacaagataaagttcttggcctatctgcgcaaacggtgcaatgtcaatccggcccgtggcccattccatttccgtgcccccagccggatgctgtggaaggccgtccgaggaatggtcccacacaagaccaagcgaggacacaacgccttgaagcgcctgaaggtttacgagggcatcccatcgccgtttgatcgccagaagcgtctgtgtgtcccaacggccatgagacagctctgcctgcgtcccgacaggaagttctgcgatgtcggacgagttgcccatgaagttggctggaagtaccgagacgttgtcaacaacctggaagccaagaggaagatcaagtcccggttgtcgtacttgcactcgaagaagctgaaggtaagtgccagttgtaacagtgggatgaaggtattcgcagataagtgagatttcgataggcctccagaaacggtacccgcctttgggagtgtgctaaacagtttaagcagggctagaagcaggtatctcataagagacttggtctttgttatattgcatgtctctaaaaagttatcatttttaacggaaggttaagtaaagagtattacacc

SEQ ID NO: 1777 - DNA, 400 bp, Aedes aegypti
aattcggcaaattatatattcacctgtttatcaaaaacatgtctttttgaatttaatttaaagtctaacctgcccactgataaattattaaagggccgcagtattttgactgtgcgaaggtagcataatcagtagtcttttaattgaaggcttgtatgaatggttgaatgagatatatactgtcttttttaaatttttatagaattttattttttaattaaaaagttaaaatgtaattaaaagacgagaagaccctatagatctttatttttgttaattataaattaaaaagaataattaaatttatattttaataaaaaaatttactggggtggtattaaaatttaaaaaacttttattttcaatttacattaatttatgaatatttgatccagttata

SEQ ID NO: 1778 - DNA, 1214 bp, Aedes aegypti
ggtgaatatcagtatcttgaaataattcatattcaccactgacaaactcataggaacatagcgataactacgtcactacgatgttgctacttgcgagcatgacataatttgtatgtcaatggagtatcagaaacgaagatcaaaaaatggagatcaaaaacgtatgtgtgccttttacccaaatgaatcgtcattataagagaaaacctcgattttcaccgctttaaaactcaacgatttttcttgtattactggttttttccgtgcatcagcccacccctacacagtttttacggtgccttattttttctcagtgtacgctgattccttttgcaacttgcaagcaaatccctagcagaaaattttcatgccgatcgtcccatctgtcagatagctgtcaaaattttaatcaacttccgcctccgaactgtcgactttcctttcgctctttttccgtcataaagctacggctgttgaaacacatttcgtaaagtttgcgaaaattttaatgtaagtcggcatttaattggttttgattgagatctatttaataacgtgaagcatcctgatttgtgttatcacaaaaaacattgaaattgtgtgaaactgttggttaaaatagtgatattgtttactggatgttaaccttctccgcccgctagctctgttttggtacacatcgaactaaacttctgtttttctaatttcagaaaatgtcggatgtcgaagtcgaagccccggtcgctccagtcgacggaacgatggatgtcaacacagcgctgcaggaagtgctgaagaagtccctgattgccgatggactggtccatggaattcatgaagcctgcaaagctctggacaagcgtcaagctgtcctctgcatcctggccgaaagctgtgacgaaccccagtacaagaagctcatcacagccctgtgcaacgagcaccagattccactgattcgcgtcgattccaacaagaagctcggagaatggtccggcctctgcaagatcgacaaggaaggcaaaccccgtaagatcagcggagcttcctgcgtagtgttgaaggcttacggcgaggagaccccagctcatgacgttatccgagagcatctcaagcagctgcggcaatcgagctaaacaaaaaaataagggatcgcaaaaaatgtttattaaacaaaacaatacataacgtgaaaattcagtaattccatcgat

SEQ ID NO: 1779 - DNA, 611 bp, Aedes aegypti
tctttctctttccggcaatcgtatggaattgttgtaacacatttcgtgcaagatgtttatgcccaaagcccatcgcgtcgccatctacgagtacctcttcaaagagggagtcctagtggcccagaaggatttctatgccccgaagcacccggagctggaaaacatcccgaacctgcacgtcatcaagacgatgcaatcgctgaagtccaagaacttcgtgaaggagcagttcgcctggcgccactactactggtacctgaccaacgagggtattgagtatctgcggtcctacctgcacctgcccccggagattgttccgtcgacgctgaagcgcgctgcccgttcggaaccacagagggcccgtgccgctgccggaccccggtctgccgatggccccaagggaggcgaagaccgacaggcgtaccgtcgcacccagcaagccggaggcccggacaagaagggcgatgtcggtgccggagccggagatgtcgaattccgaggaggatttggccgtggttccaagccgcagtaaggcacggattgattccatctgtgtatatttaataataaaaagtatgatctaagaaaccaatcattcgccaccaatggaa

SEQ ID NO: 1780 - DNA, 573 bp, Aedes aegypti
atgcaagtgtcaaaaaacttcggaatttgcgtttggccacttcctgctttcatcgcctgtcgtcggcggacgttctttccgagtacatttgccaatatgcctccgaagaaggataccaagggagcggcaaagcagccgcaaaagacccagaagaagaaggaagggtctggaggtggcaaggccaagaagaagaagtggtccaagggaaaggttcgcgataagctcaacaaccaggtcctcttcgataaggccacctacgagaagctctataaggaagtgcccgcctacaagctgatcaccccctcggtcgtgtccgaacgtttgaagatccgaggctccctggccaagcgcggtctgcgggaactttgccagaaaggtctgatccgaatggttgttcaccaccacgcccaggtcatctacacccgcaccaccaagggagacgatccagtggcataagctgctactacttaggtacattctgacgaaagtgtgaggaggggtaagcttttttgcgattcgccagcaggatgtaagatgttgcgaaaagggagataatatacttattgataagta

SEQ ID NO: 1781 - DNA, 1045 bp, Aedes aegypti
caaccgaactgtcaaagtttgcgttcgactgtttcctgcgtttccgtctttctttcccaacgtcaagatggctgatcagaacgagcgtgcgttccagaagcaaaacggtgtcaacctgaaccgtaaacaggtcaacaagaagaagggtctgcgcctgcaccacagcatcggtctcggattcaagacccccaaggaggccatcgccggtacctacatcgacaagaaatgccccttcaccggacacatcgccatccgtggccgcatcctgaccggagtggtccgtaagatgaagatgcagcggacgattgtgatccgtcgtgactatctgcacttcatccgcaagtacgaccgtttcgagaagcgccaccggaacctgagcgtgcatctgtcgccgtgctttaggtgagtgtcaatagccgaagcaatccgagaccatggtcggtcaaacgcaagtgttcactctgtgtcattcggaacacccatagaatgatgctatttaatcttgcgatagtaaaccttttcaagcggcataactattcacggaacggttcacggttctcatacgaggccaattggcgtttcgatgcaagtagctgctacatttgtcgtaccaagttcgtaccctgttcataacttgattaactcgaggcttaggaatcaactccagaatcacctgtagtagtctgaccaacattacttcttaagggcaggtaacactagctggtttcttgtttgagagatcctttaaatgtctatttctaattaaaggcctcgaaaacctcttttttcaacaaaagtggtctttaaaatcactttccttcttcacatgctctacaggaatttctttttctccagaaataactctagagaacctttcaaaatttgctgcattccgtgcagcaaaccctgtaggattattatcaaggcattcgattgattatttttaaagaattatgttagaaattagcatagcatagcataaactgactgcacatgtcaatggttgctattccgtgattgatcggaactggtaagaattgcacta

SEQ ID NO: 1782 - DNA, 159 bp, Aedes aegypti
aataagaaaaatataatactgttagaatttgtcctgttaaaacataaggatcttcaacagggcgagctccaattcaagttaaaagggaagctacaattactatatttcaaaataaaatttgatttaaaggatagaattgtaatcctcggaatttactag

SEQ ID NO: 1783 - DNA, 775 bp, Aedes aegypti
cccctctcgcaaacttcagcgcaaaaccaaacgtcaaccggctgccgtcgttcgaatccgttaggttggcagcaatcatcaaccattctctttctttccggtccaaaatgaccttcacacgttttgtggagactggccgcgtggccaaatgcgccagtggaaaatacaagggaaaacttgtcgctatcgtcaatgtgattgaccagaatcgggtgctcatcgatggcccaaccaccggagttccccgccagcagtaccccgtgaaccacctgcacctgaccaagtaccgggtgaagttcccgtacaccgccaagtccaaggtggtccgcaaggcgctggaagcgtacaacctgaaggagaaattctcgaccaccagatggcaggaacgcgccgccgccaaggctaagcgttgcaatctgaccgacttcgatcggttcaagctgcgtctggctcgttccgagcgcaaccgcatcgtcagcgcccagttcaagaagctgaagaaggaggtcgtcaacaacggtatgctgttcggcaagccagtcaagggcacgaagccactgccgaagcgacgcaaccccatcccgaagaaggagggcaagaagaagcgcgtccggaagaacaagaaggccccggccaagaagtgaacagcttcttaccgctgagtggaagggggtgttttactattacgtgcggatgtgtgtactgaagaaatgggagaatatacataattgctaaaaagtaaacaaactagttacgcttaatataggatgaaata

SEQ ID NO: 1784 - DNA, 1223 bp, Aedes aegypti
gttgaaaactctctttccggcatcttgtaaggataattcaagatgggtcgctacgcaaaggaaccagataatcccgctaagtcgtgcaaggctcgcggatcgaacctccgggtgcatttcaagaacacccgcgaaacggcgctagccatcaagcgtatgcctctgcgccgtgcccagaagttcctgaagaacgtctgcgagaagaaggagtgcgttccattccgtcgcttcaacggtggtgtcggtcgctgcgcccaggccaagcactggaacacatccgttggccgttggcccaagaaatcggccgagttcctgctgcagctgttgaagaacgccgaagccaacgccgactaccggggactggacgttgaccggctggtcgtcgaccacatccaagttaaccgggcgccgtgcctccgtcgtcgtacgtatcgtgcccacggtcgcatcaacccgtacatgtcctcgccgtgtcacatcgagctgtccctcaccgagaaggaggatgttgtgaccaaggccgccgagaacgaacccgctaagaagaagttgtccaagaagaagctccagcggcagaaggagaagatgatgcgtaacgagtaaacttaatgcttaagttgtttattgaaggagttaaccgtgaatacaaatattggaagccgtaagaaaagtaagtcactctgctgttgtttgctttttgtgccaagtggaaagtttgagaacactcctgtcgtcgcatcaacttccttaggttcacagataccaaacaaggtgttaaatagatcagagatattccccttcacttctgccttttattccggttcagaaaaaccgcataacatctccactgcgacagcgtcgtcagcttttcagcttagtgttccatagaacataagcctaaaccgcccagattccaccctttgtttaataaagttacacaaattcgggctcttctgggccaacaaaccatgtgttattttcacacatcctgcaaatcgattttgttttcttttttcttctcattttcacactaaaagtatgtgttggtccagaagaacacgattttgtgtaacctcgtttaagatcgacgatcttttcgtgttgaaatttttcataggtacgctttttatcatggtatcatggtttaagaggatctattaacccatgttaccatcctgtaaaataataccgaaaaaggataaattgatgtcctaaaatgattt

SEQ ID NO: 1785 - DNA, 423 bp, Aedes aegypti
atgaagtgcttcgttgccattgccctgttggctgttgccgttagtgcatcgcccatcgaatacggacactatggtgccccagctctggtgcacgccccagttctgcacgccgctccagttgtgaaacacgtcgtcgccgagccagtcgcctacccgaaatactcgttcaactacggaatcaaggatccccatactggtgacatcaagtcccaggccgaagaacgcgacggtgatgttgtcaagggacaatactccctcgtcgaaccagacggttccgtgcgcactgttgactacaccgccgatgaccacaacggattcaacgccgtcgtgcacaagtccgccccagctgtccacaaggttgttgctgctgccccagtcgcttaccacgctccagctccaatcctcagccactacgttcactaa

SEQ ID NO: 1786 - DNA, 438 bp, Aedes aegypti
ttctttttccggtcggccattgggatcgaaagtgaacacatttcactgaatcatgggcaagattatgaaaacaggaaaggtcgtgctcgtcctcggtggacggtacgctggccgcaaggccatcatcctcaagacgttcgacgatggaacctccgataagcagttcggacatgctctcgttgccggcatcgatcgctacccccggcgagtgacgcgtcgcatgaacaagacccgcctgcacaagcgctccaagataaagccgttcatcaagttttcagtatgcaatctacgaaatactccgttaccacgcaacgcaacgcaacgcaacgaatggaatgaaggttattgaagtgaaaaacatgaaatgtacttccatctatacgcgaacatgaactatctgaagtgcctcgtcattgtacgtcatgtattctctagtat

SEQ ID NO: 1787 - DNA, 637 bp, Aedes aegypti
ctctcttttctgttccacatcttgtgtgaggacgtagtgtgaaatactcgcccaagtttttggattttttcgggtcgaattcccaattgtacaaccatggccgacacgaccgaagctgagggagtcaagaagaagcgcgcgttccgcaaattcacctaccgcggggtggatctggaccagctcctggacatgaagcaggatctgctgatggagttgatgcacagccgtgccaaacgacgcttgaaccgtggaactcgcaggaagcccgtggccctcatcaagaagctgcgcaaggccaagaagaacgccccaccgaacgagaagccggccatcgtcaagacccatctgcggaacatgattatcgtaccggagatggtcggatccattgttggtatctacaacggcaagacgttcaaccaggtcgaaatcaagccggaaatgatcggccactatctgggagagttctcgctgacctacaagccggtcaagcacggaaggcccggtattggtgccacccacagctcccgtttcatcccgctgaagtagagagtggactggtgttattattcttataatttctcttgtaagtagaccgaagagcaggtgaggaaaatacaaaaaggattgtaaacaaaca

SEQ ID NO: 1788 - DNA, 490 bp, Aedes aegypti
tattccggctgtcatttacaccgaggaggaaaacatggctccccgatacgaaatctgtgtcggtcttaacaaaggccacaagaccacgaagctgaggcagctgcagtaccgcggcgatcgcaaggtcaagggaatccgcccgtcccgtacaaagggaatccaaaccaagcacaccaagttcttccgcgatttggtccgggaggtcgttggtcatgccccgtacgagaagcgcggtatggaattgctgaaggtgtccaaggataagcgcgccctgaagttcctgaagcgtcgcctcggaacgcacatccgcgccaagaggaagcgtgaggaactgtccaacatcctggcccatatgcgtaaggccgcccacaagtaagctgctgcagcattggcttgtgtgtgagaactttacaccgttcgctctgtttgtaatttaaggattactacatcccaaaaaccttctgtgaagaaaaagtaccctttaaaatat

SEQ ID NO: 1789 - DNA, 912 bp, Aedes aegypti
cgtgcgagtgtgaaaccgactttatccttctctacttccgtggttcttgcatcaatctgtcacaaaaatgactaagaagaggcgtaatggaggacgctgcaagcacaaccgcggccacgtcaaggccgtgcgttgcaccaattgcgcccgctgcgtcccgaaggataaggcgatcaagaagttcgtgatccggaacatcgtcgaagccgctgccgttcgtgatatttcggatgcttcctgctacaactcctacgttctgcccaaactttacgcaaaattgcactactgcgtatcgtgcgccattcactcgaaggtggtccgtaaccgatcgaaggaagctcgccgaatccgtacgccaccccagcgggcgttccccaaggacatgaaccgccaacagaacgctcagcgcaagtaaatcgtcgttatcgctgctaagtcgtgtcgagttgtgcaaaaaccgataccacaatgccgaacgtcgaacgtggcgaatttggcatctcccgggatgttaattccagggtaagccagttggccagtgttcggcgctcgcaaacaagttgtatttggattaacatggtcgcttaaggaggataaatggaggaaaaacattgaaaataagatttacaaaaaccaaatgtgaattgatgatgttcgcgcgatgacaatccggtttaggtgttcccttatgtatcaaccggctcctatagcaggggttttctgacattttgttaccctcgcagcacttttcaaatttatccctctctttcccatatggtggagctccattggttttcgatgaattcaagacaaactatgcaatagattgaatccataataattagattgattcaatattcaattaattgtttcaatagttaaaactattaaaaaactgaattaaacaaaaaa

SEQ ID NO: 1790 - DNA, 593 bp, Aedes aegypti
acgtcaacaaggcgccacctgatcaacggagcatcgaactatttttctcactcgcgatcgtctccatcattgtgcagaagaatcgaacgagtggtgtgtgaattcaacttattttttgagccagtgaaaacccggaccagaataaatctccgaaaatgcagggaatgagcttggccagcatcaagaagaacccagcgcttatcccactgtacgtgtgcgttggtttgggtgccgttgctgccgttttctacacggcgcgtctggccatccgtagccccgaagtcagctggaaccgcaagggcaaccctgagccatgggaagagtacagaaacaagcagcataagttcttctcccccgtcagggactactccaaaaccgagagcccggcccccaaatacaccgaataagctggtcagtagcagtttgggcgtgtggttcggcatccgcaagaacccgcgtattgtagcaccttgtgtaacaacatcgttagaaaatctacgatttggtgtgaatggtgagaacaactcaatatgtggtcgaaaagtaagtttaataaagttgaataattgaaaggaagctaccgccaaatcgaa

SEQ ID NO: 1791 - DNA, 706 bp, Aedes aegypti
ttcttttccggtaacttgtgttgtttgatgaacacattttcatcgttccgcggataatttccaaaatggccaccaaaaccgcttcgaaggataaatccaagaatattatgcgcgatcttcggatccgcaagctgtgcctgaatatttgcgtcggtgaatccggtgataggttgacccgtgccgccaaggttctggaacagctgaccggccagacccccgtgtactcgaaggcccgctacaccgtgcgttcgttcggaatccgtcgtaacgaaaagattgccgtccactgcacggttcgtggattcaaggcggaggaaatcctggagcgtggtttgaaggtccgggaatacgagttgagacgcgacaacttctcccagaccggcaacttcggcttcggtatccaggaacatatcgatctgggcatcaagtatgatccctcgatcggaatctacggtctggacttctacgttgtgctgggacgcccaggatacaacgttgcccagagacggcgtaagaccggcaagatcggtttcatccaccgtctgaccaaggaagacgccatgaagtggttccagcagaagtacgacggtatcatcctgaacagcaaagcgaagtaaaatgcgttccaaatccaagtttttactgtctttgtaataagcactataagtaacacaagaaaaaaatatgaaaatacctgaactctact

SEQ ID NO: 1792 - DNA, 865 bp, Aedes aegypti
gtcgttctcttttcacttgtagtcgtcgtcgagtgcggtcgcacaacgcagcatcatggcaaccaaagtgtcgaaggatatcctgtacgaatgtgtgaacgaagtgctgaaaggctcgaagaaaaaacaccgccgcttcctggagactgttgaactccagatcggactgaagaactacgatccccagaaggacaagcgtttctcgggcactgtcaagctaaagtacatcccgcgcccgaagatgcaggtgtgcgtcctcggagaccagcagcactgcgatgaggccaaggccaacgacattccctacatggatgccgaagcgctgaagaagctgaacaagaacaagaagttggtcaagaaactagccaagaagtacgacgctttcctggcttcggaatcgcttatcaagcagatcccacgtctgttgggtcccggtttgaacaaggccggtaagttcccgggtctgctcgcccacagcgaatcgatggtgcagaagatcgacgaagtcaaggccaccatcaagttccagatgaagaaggtcttgtgcctgtcggttgccgtcggacacgtcaagatgaccccggatgagctcgcccagaacgtgcatttgtcgatcaacttcctggtttcgctgctcaagaagcactggcaaaacgtccgctcgcttcacatcaagtcctcgatgggagccgcccagcgtctgtactaagattggatggaaacggagcggtccggatcgcggtaccattttacggtactcgccgggatcgcctatgatgtacgtatgttacaaacttcggatagacttatgcataagtaaaatttttgcaatttaaatacaaccggatcgttgcaagaagaaata

SEQ ID NO: 1793 - DNA, 662 bp, Aedes aegypti
ctctttttccgtcatcttcgattgaagaaactgcacacatttcgtgtcagcttttaaatttcaatcaaatttagtaacatttcgataaaatggccaagcgcaccaggaaagtcggaatcgtcggtaaatatggtacccgatatggtgcctccctgcgtaagatggtgaagaaaatggaaatcacccagcacgcaaagtacacctgcacattctgcggaaaggatgctatgaagcgttcctgcgtcggaatctggtcctgcaagcgatgcaagcgcgtcgtcgctggcggtgcctgggtgtactcgaccactgctgcggcctcggtccgttccgctgttcgtcgtctgcgcgaaatgtaaaaagaaaggctgtattccatcgaatgatttacctaataccaataagtgaatgaaacgttactttaaatcatcgtcatacatcggcactcgtacaaaaaagctgctggattgtgccccctagagcaaccaggaatccgtgtatgcaaaaaagggaaaggatgagaaaagtgtgtggaataaagaaggagatccatcttctggaaggtgaattaatctgaaaacgaacaacttgtggatattatgctgaaattatgagaaaatccgatctgattagattagccttccggtcgtcgagcggtttgc

SEQ ID NO: 1794 - DNA, 624 bp, Aedes aegypti
gccggaccttcttttcggttgttcctttcttcccgaacgatcagccgcgtgttgtactctgatcaaataagctaaaatggtcccgcgtccagcttataagcccaagatcgtcaagaagcggacgaagaagttcatccgccatcagtccgatcgctatgacaagcttgcccccaactggcgtaagccgaaaggtattgacaaccgagtgcgccgtcgcttcaagggtcagtacctgatgccaaacatcggttacggatcgaacaagcgcacccgccatatgctccccaacggcttcaagaagttcctggtccacaacgtgcgcgagctggaggtgctgatgatgcagaaccgcgtctactgtgccgaaatcgcccacgccgtgtcgtccaagaagcgcaagcagatcgtcgagcgcgcgaagcagctggccatcgctgtgaccaacccgaacggccgcctgtgctcgctggagaacgagtaagctcccaggagtttattttctatctgtgcgaatgtgtgacgggctttggtgcccaatttcggaacgtcggtatgataagctggggttttggaactttctttataagtgagaaatatgagatacagaggagttaattaaatgaa

SEQ ID NO: 1795 - DNA, 780 bp, Aedes aegypti
atgccgcagaacgagtacattgagcgccacatcaagctgcacggccggcggctcgattatgaggagcgcaagcggaagcgtgaggcccgcgagcccaagaagcgcgccgccatggcccgcaagctgcgcggcatcaaggccaaactgttccagaaggaacgacgcaacgagaagatccagatgaagaagaagatccaagcgcacgaggagaagaaggtcaagaagaccaccgagaaggtcgaagatggagcgatcccggcgtatctgctggatcgtggcgtgcagtccagtgccaaggtgctgtctaacatgatcaagcagaagcgaaaggagaaggccggcaaatgggacgtaccgattccgaaggttcgcgcccaggcagattctgaggtgttcaaagttatccgcagtggtaaaaccaagcggaaagcgtggaagcgaatggtcactaaggtcacctacgtcggcgagaacttcacccgaaaacctccgaagtttgaacggtttatcaggccgatggccctgcgcttcaacaaggcacacgttacacatccggaactgaaggccacgttccacctgccgatcatcggcgtcaagaagaacccctcctcgcccatgtacaccagcctgggcgtcatcaccaagggtactgtgatcgaggtgaacatctctgagctgggtttggtgacccagtccggtaaggtcgtctggggcaagtacgcccaggtgacgaacaacccggaaaacgacggatgtattaacgctgtgctgttagtttag

SEQ ID NO: 1796 - DNA, 1002 bp, Aedes aegypti
ctaccagaaatcgagcctgtttgtggcagccattagcgctttcaaaaacctggattgaaacttcgctttggaagttcaaccggtgaactcggagttgcgattggcctaattttggtgaccgtttgtatttttgagtgtatttacgaaaactgctcgaatattccagcgtcatcggcgtcttttatgtgttttggcaaccttgccactgcccgggctgcatgggcatcgaccagcgtgaagtttccgtcacttcctgccggctgtcactgtcaaagtcaattgacgccagaagaggcgctgcacgtcgtcgtccatttcctatttcttttactttgtgaatggtgtcagagtaaggcatcaaggatgcagatcttcgttaagaccctgacgggcaagaccatcacccttgaggtcgaaccgtccgatacgatcgagaatgtcaaggccaaaatccaggacaaggagggaatcccgccagatcagcagcgtttgatcttcgccggcaagcagctggaagatggccgcaccctgtccgactacaacatccagaaggagtccaccctccacttggtgctgcgcctgcgcggtggtgccaagaagcgtaagaagaagaattactccacccccaagaagatcaagcacaagaggaagaaggtcaaactcgccgtcctcaagtactacaaggtcgacgaaaacggcaagatccaccgtctgcgtcgtgagtgcaccagcgagacctgcggtgccggagtcttcatggctgcccacgaagatcgtcactactgcggcaagtgccacctgaccctggtctattccaagcaggaggaaaagtaaaagatggctagcctgcgcctctctccgggtgctttttgcgtttactaagtagaaatgcccgaagggatcttcttctctaatgtttaaggattacgaaaatataaatggggttaaatccacctaataaaagcttgatacggtttcacattccgtattgacacctaagag

SEQ ID NO: 1797 - DNA, 937 bp, Aedes aegypti
actcttttcccgtgtaacctcgttgagctagcacgcgttttctcggtgttccgtcgttcgtttccgtgaaacagaaccaaacctagtgaaaatgggtcgtatgcacgctcccggtaagggtatttcccagtcggcgcttccgtaccgccgttccgtgccatcgtggctgaaactgaacgccgatgacgtgaaggagcagatcaagaagctcggcaagaagggcatgacgccctcgcagatcggtatcatcctgcgtgattcgcacggtgtggcccaggtccggttcgtcaatggcaacaaggtcctgcgcatcatgaaggccgttggcctgaagcccgacatccccgaggatctgtacttcctgatcaagaaggccgtctcgatccgcaagcacttggagcgcaaccgcaaggacatcgacagcaagttccgtctgattctgatcgagtcccgcatccaccgattggctcgctactacaagatcaaggctgtcctgccacccaactggaagtacgaatcgagcaccgcctcggccctggttgcctaagaaggagctgttccattcgacttttgtattgttttaagtaatatccattcagaggtgaaaaaagtgctcccgtaccaacacttatctgggggaagaagaacacacaatccgaaacatgaaagtgtcatgttggaaggggaagaaatctatccggtaatctaccaataaacggttcacattgaaacagtgaagctaatggagtatttgatcatcgaataagaacatccctgaaagagcgaaaatcatcctagaagtcgtcggaaaatatgtgtaggtcaaacagtcttcggcaactcgtaaaatacattttggaacgtttaatcagagttatggttggttgagcctttatttttaattagttttattttaggctgatacaaatattaattt

SEQ ID NO: 1798 - DNA, 506 bp, Aedes aegypti
ctcttttggatagtagattccgtactgtgcagtgttctccctccgagctaaggtcaagtttttgacgacttgcacggtttttcgtcattgaaaatggctctcaacaaagctgaactagcctgtgtgtactcggcgctcatcctcgtcgacgacgatgtcgctgagaccgatgagaaaatctcgaccatcctgaaggccgccaacgttgacatcgagccatactggcccggtctgttcgccaaggccctcgaaggtatcaacgtcaaggatctgattaccaacatcggatccggagttggaaccggaggtggtgccgccccagctgctgctgctcctggagctgccccggccgccgccgaaaagaaggaagagaagaaggaggaagaacccgaggagtccgatgacgatatgggattcggtctgttcggttagatttgttctcatcggaatgctgcagtggggaattgcaggttgatagcctgttctttcctccaacggtggcattt

SEQ ID NO: 1799 - DNA, 207 bp, Aedes aegypti
atggaggtggattcggaggtggccagggggggccatggacagcaaggatttggccagggaggtggtttcggaggacagggatcgcacggtcaatctggattcggaggtggtcatggcggtggcaaacagggctttggatctggcggccatggttctagtggacatggtcacggtcatgagcacggatacaagaaacatggatattaa

SEQ ID NO: 1800 - DNA, 676 bp, Aedes aegypti
gttgtcggtagctgtcagcgaacgagtcttttccatcttgtcagccaacgaaagtaggtaatcaataaaaatggccgatacatcatcccatctgagctggttgatcatccgtgatcacaacgctttcctgctgaagcgccgcaacatcaagaagccgttcagcacggagcccaacaacctgaccaacctgagctcgtaccgttacagcggactggtccacaagaaatcgctgggtgtcgttccggccgataagggaatccaggtcgtgtacaagcgaccaaagttccagaccaagccagccaaggctacggttaaggttacgctgaagcatcgcccacgtcgcaccctgaagaagctgaagaacatcgtcaacaagaaccgttaccgtcgggatctgcgacaggctgctcttcgtcgtgccagcgccatcctgcgatcgcagcgacctgcttcggcaaagaagggcaaggctgccaccagtactggaactactgctgccgctgctgctgcccccaagaaggccgaataagcaagcggatggagtattgaaggaaaacaacattgacatccctcgttgtatttacggaaaattggaaatgttatcgttgtctctatgagtgcaacgataacaggaaaatacaaaacatgatttgatgctgtgaatgtgctttggtaa

SEQ ID NO: 1801 - DNA, 452 bp, Aedes aegypti
tctctttccgttttgttgtagaaaagtgttcgcacttaaaattcgataccgcttggcatttaaggctacaaaatgaccaagggtacttccagctttggaaaacgtcgcaataagacccacacgctgtgtcgtcgttgcggtcggtcttcttaccacatccagaagcacacctgctcccagtgcggatatccggcggccaagatccgttcctacaactggtccatcaaggccaagaggaggaagaccaccggaactggccgcatgcgctacctgaaggttgtgcgccgcaagttccgcaacggtttccgtgagggacaggttgccaagccccgcaaggccaccgcataaacggtacagaacaacaatgaatgtttctacaatgtgaagtgcgctgtttgatgaaggagaaatatatcttaaatcattcttaagagagctactcgcaccttata

SEQ ID NO: 1802 - DNA, 1990 bp, Aedes aegypti
tttaatccttaactcgtttccgattgtttatttttattcttgtttccaatacatacaacccacctgccgctgctgttgttgctgtcggtgttgttgtcaatgagatcgacggcggcgaatggcttagtcgacttcctcgatggtgggtccggatccggatccggcaccaggggcagcaccagcaccggctcctggggcaccacctgggaatccaggcatacctcctggggcaccaccggcactctggtacagcttggtgatgatgggattgcagacggattccagctccttctgacggtgttcgtactcctccttctcggccagttggttggcatcgagccacttgatggtatcgttgcacttgtccatgatgagggtcttatcgctatcggtgatcttgtccttcagcttgtcgtcctccatggtggccttcatgttgaagcagtacgactccagagcgttcttggccgagatggtttccttctgcttctcgtcctcagagcggtatttctccgcttcgttgaccatgcgttcgatatcctccttgctgagacggcccttgtcgttggtgatggtgatcttgttttccttgttggtcgacttctcgagggcagtcacattcaggataccgttggcatcgatatcgaaggtgacctcaatctggggtacaccgcggggagctggtgggattccggacagttcgaacttgccgagcaggttgttgtccttggtcatggcacgttcaccttcgaacacctggatcagcacaccgggttggttgtccgagtaggtggtgaaggtttgggtttgcttggttggaatggtggtgttacgcttgatcagaacgctcatgacacctccggcagtttcgataccgagcgacagtggagtaacgtcaagcagcagcaggtcctgcacttcttcggacttgtctccgtgcaggatagcggcctgaacagcagcgccgtaggcgacggcttcatcgggattgatcgacttgttcagctccttgccgttgaagaagtcctggaggagcttctgtaccttggggatacgggtggatcctccgacaaggacgatgtcgtggatgctggccttgtccatcttggcatcacggatggccttttcgacgggttccatggtggaacggaacagatcggcgttcagttcctcgaaacgggcacgggtgatcgaggtgtagaagtcagttccctcgaacaacgagtcaatctcaatgctggcctgggtcgacgacgacagagtacgcttcgcgcgttcgcaagccgtgcgcagacgacgcagggcgcgcttgttcgtcgacagatccttcttgtgcttgcgcttgaattcctgggcgaagtgattcaccaatcggttgtcaaagtcctcaccaccaagatgggtgtcaccggcggtggacttgacctcaaagataccgtcatcgatggacaggattgacacatcgaaggtaccgccaccaagatcgaagatcaggacgttgcgctcgccggcggtcttcttgtcgagaccgtaggcaatggcagcggccgtaggttcgttgatgatacgcagcacgttgagtccggagatggttccggcatccttggtggcctgacgctgcgagtcattgaagtaagcaggcactgtcacaacggcgttggagaccgtcttgcccaggtaggcttcggcggtttccttcatcttggtcagcaccatggaactgatttcctctgggaagaagtttttggtctctcccttgtattcgacctggatcttaggcttgccctcgaccgagatcacatcgaacggccagtgcttcatgtcggcctggatggctggatcgtcgaacttgcgaccgatcagacgcttggcatcgaagatggtgttggttgggttcatggcgacctggttcttggcggcatctccgatcagacgctccgtatcggtgaacgccacgtaggacggggtcgtgcggttaccctggtcgttg

SEQ ID NO: 1803 - DNA, 297 bp, Aedes aegypti
actgggaacgtggcgtctcctgtaacgtggctgctcacgggtcgggttacggactgatttgaggttggggtccactgtgtgccgggtaagtccatgttgacgggacgtccgcactaagctgaccgtcaatatgggtgcaatgggggagcccgatgcattcaggttggctaaagagagatgaaccgagcgaggggtgaaaaccagcagctaaaagtctccgcggtaagcagtagtgggatcgcgtcccggagtggacttccggtaccagcctgaccaatacagtcacactgtaatctt

SEQ ID NO: 1804 - DNA, 295 bp, Aedes aegypti
actgggagcgtggcgtctcctgtaacgtggctgctcacgggtcgggttacggactgatttgaggttggggtccactgtgtgccgggtaagtccatgttgacgggacgtccgcactaagctgaccgtcaatatgggtgcaatgggggagcccgatgcattcaggttggctaaagagagatgaaccgagcgaggggtgaaaaccagcagctaaaagtctccgcggtaagcagtagtgggatcgcgtcccggagtggacttccggtgccagcctgaccaatacagtcacaccgtaacc

SEQ ID NO: 1805 - DNA, 621 bp, Aedes aegypti
cgcagctcttttccaatctagctgtctaaaatagtggaagccagtgcattcccacagcgttcaaaatggtgaaggtgaaatgctcggaactgcggaccaaggacaagaaggagctgaccaagcagctcgaggagctcaagactgagctgctcaatctgcgtgtggctaaggtcaccggtggagctccctccaagctgtccaagatccgcgtcgtccgcaaggccatcgcccgcgtctacattgtgatgaacaccaagaccaaggacaacctgcgcaagttgtacaagggcaagaagtacgtcccgctggatctgcgccccaagaagacccgcgccatgcgtaaggccctgtccccccgggatgccgctcggttgacgctgaaggaacagcggaagcgcgccaagttcccgaagcggaagtacgccgtcaaggcctaaatgcaatgactctactgtgaggaacggttgtgtcaaagtgcaagcgggctcttttgttctttaaacttttgtttgtaagttgcggtaaaaacactaaggaacggaaccggttttgggttctcagccgaagtactggagaggacggagaaaataaattccggaaaaaagattccaaactggacgc

SEQ ID NO: 1806 - DNA, 735 bp, Aedes aegypti
ttcttttccggctgtcatttacaccgaggtaagacgtgattccgtgcggtctcgatttcaaaacgtcgaattatttgcaaagaaatggatatgattccattttttctgtgccaattggttgctggaatacagttccgtggaaatcgttcattttgcggcggtgaaatcgcgaaaccgccttgaaaataagcagtgttattgttagtgtctcatcgctttttaatctcacacttctgcaggaggaaaacatggctccccgatacgaaatctgtgtcggtcttaacaaaggccacaagaccacgaagctgaggcagctgcagtaccgcggcgatcgcaaggtcaagggaatccgcccgtcccgtacaaagggaatccaaaccaagcacaccaagttcgtccgcgatttggtccgggaggtcgttggtcatgccccgtacgagaagcgcggtatggaattgctgaaggtgtccaaggataagcgcgccctgaagttcctgaagcgtcgcctcggaacgcacatccgcgccaagaggaagcgtgaggaactgtccaacatcctggcccatatgcgtaaggccgcccacaagtaagctgctgcagcattggcttgtgcgtgagaactttacaccgttcgctctgtttgtaatttaaggattactacatcccaaaaaccttctgtgaagaaaaagtaccctttaaaatataaacaaaatcgtttactgaatcagctatgct

SEQ ID NO: 1807 - DNA, 1250 bp, Aedes aegypti
tctttttcccgcagacaccgacgtgtagaaaacgtgttaacgtagcgagtgtctatttttccatttttcagcaaaatgggtttcgtgaaggttgtaaagaacaagcagtacttcaagcgttaccaagtcaggttccgccggcgtcgtgagggcaagaccgattactatgcccgcaagcgtctgatcttccaggacaagaacaaatacaacaccccgaagtatcgtctgattgtccgtttgagcaaccgtgacatcacctgccagattgcgtacgcccgcattgaaggggaccgtattgtctgcgccgcttactcccacgagctgccgcgctatggcgtgaaggtcggtcttaccaactacgccgctgcttactgcactggactgctggttgcccgccgcatcctgcagaagcttcgcctggacactttgtacactggatgtaccgatgtgaccggtgaagagtacttggtcgaaccagtcgatgatggcccaggagcgttccgttgctatctggacgtcggtctggcccgtaccaccactggtgctcgcatcttcggtgccatgaagggtgctgtcgatggtggcctcaacatcccccactccgtcaagcgtttccccggatacagcgccgagaacaagagcttcaacgctgaagtccaccgcgcccacatcttcggccagcacgtcgccgactatatgcgcactctggaggaagaggatgaggatgcctacaagcgccagttcagcaagtacatcgccctgggaatcaaggctgatgatattgaaaccatctacaagaacgcccacgccggaatccgcaaggatccagccttccacaagaagccggagaagaaggtcaccaagaagcgtttcaacctggccaagctaaccctcgaagcccgcaaggcgaaaatcgccaagcacaaggccgacttcctggccaagatccaggccgatgtcgaagcctaaaccagtcttttgctgttacgctccagtggataaacatcatcgggagcctgcaccgtgccacaacgccatcggtggcccacgttgtccatctattgctaatctttatgtagataagcaatatttgtaatttttgaataaacgtaatgtttctattcagctgcaacgtgagaaaatgttggctttttactgaggtattcacgttctggataactatttagttttgtaaggaatataatataatcaatgaaaatatattaaaagtttaaaattatgaacaaaaa

SEQ ID NO: 1808 - DNA, 600 bp, Aedes aegypti
ggacgttctttccgagtacatttgccaatatgcctccgaagaaggataccaagggagcggcaaagcagccgcaaaagacccagaagaagaaggaagggtctggaggtggcaaggccaagaagaagaagtggtccaagggaaaggttcgcgataagctcaacaaccaggtcctcttcgataaggccacctacgagaagctctacaaggaagtgcccgcctacaagctgatcaccccctcggtcgtgtccgaacgtttgaagatccgaggctccctggccaagcgcggtctgcgggaactttgccagaagggtctgatccgaatggttgttcaccaccacgcccaggtcatttacacccgcaccaccaagggagacgatccagtggcataagctgctactacttaggtattgttaaccgaggagctgtcctatattaggtgaagaaaataagtgcgtgtgtacgattacctgttttgtcgcaccccgcctaggtacattctgacgaaggtgtgaggaggggtaagcttttttgcgattcgccagcaggatgtaagatgttgcgaaaagggagataatatacttattgataagtaaaacggtg

SEQ ID NO: 1809 - DNA, 382 bp, Aedes aegypti
ctttttttttcaatccgcggtgtaaaacgtcaaaaagttctttcttgctagaaattccgagcagacaaaatgggtttcgctgatctctggtattcgcatccccgtaaatatggacaaggttcccgattctgccgggcttgctccaacaatcatggtatgatccggaagtacggtctcaacatttgccgtcagtgcttcagggaatacgccaaggatattggcttccggaagctggattaaattccctcgacgttttctcttgcggttcggtttattcatcacctttgcccgaaaagatggccgggaatggttctgttgatgttccgattattgtacggtgtcattgctgatgaataaaattgactgacaaaaaatgtaagta

SEQ ID NO: 1810 - DNA, 2748 bp, Aedes aegypti
actggttttggtcggaagaaaaagaaaaaagaaatacgctacgacgacgaggatgaggatgaaggtccacagccggattccacacttgagcagggagtgccaatccctgttcgaatgcagggcagcttccctccggaattggcctccacgcctctcgaggatatcgacagctattacgcgaatcagaggacattcgtagtagttagtaaaggaaaagatatttttcgtttctccgcaaccaatgcattatatgtactcgatccgttcaatcctatacgtcgcgtagctatttatattttagtacatccactgttttcattttttataataacaaccattcttaccaattgtatattgatgatcatgcctagcacgccgaccgtcgaatctaccgaggtgatattcaccggcatctacacgttcgaatcagctgtaaaagtgatggcgcgaggtttcatattacaaccgtttacttatcttagagatgcatggaattggttggacttcgtagtaatagcattagcatatgtaactatgggtatagatttgggtaatctcgctgcattgagaacattcagggtactacgagctctcaaaacagtggccatcgttccaggtctcaagaccatcgtcggcgctgtcatagagtccgttaagaatctcagagatgtgataattttaacaatgttttcgttatcggtgtttgctttaatggggctgcagatctacatgggcgtgctgacgcagaagtgcatccgggagttcccgatggacggttcgtggggcaacctgtcggacgagaactgggaacggttcaacaataacgactgtgcgtttctttcatggcatacaaagcaattccgtggtccaagccaattggtacttctcggaaactggagacacgcctctttgtgggactcgtcgggtgctggccaatgcgaagaaggatatatttgtttacaaggttatggagataatccaaattacgggtatacaagtttcgatactttcggatgggcattcttatctgcctttcgtctaatgacccaagactattgggagaatctttatcaactggtgttacgatcagctggaccgtggcacatgctcttcttcattgtgattatcttcttgggttcgttctaccttgtaaatttgatcttggccattgtcgccatgtcgtacgacgaactccagaagaaggccgaagaggaagaggccgccgaggaagaagcgcttcgggaagcggaggaagcagctgcagcgaaagcggccaaactcgaggcccaagcagcggcagcggcggccgcagccaacccggagatcgccaagagcccgtcggacttttcctgccacagctacgagctgttcgtgaaccaggagaagggcaacgacgacaacaacaaggagaagatgtcgatccggagcgaaggattggagtcggtgagcgaaatcacaagaacaaccgcaccaacagctactgcagctggcactgcaaaagcccgtaaagtgagcgcggcttcactttcattacctggttcaccatttaatcttcgtagaggatctagaggatcacatcagtttacgatacgtaacggtagaggacgtttcgtgggcgtacctggtagcgatagaaaaccattggtactctcaacatatctcgatgcacaagaacatttgccatacgccgatgactcgaacgcggtcacaccgatgtcggaggaaaatggtgcaatcatcgttccagtatactatgctaatttaggttcgcgacattcatcgtacacatcgcatcaatcgcgcatctcgtacacatcgcacggcgacctgctcggcggcatgacgaaggagagccgactgcggaaccggtcggcgcgcaacaccaatcactcgatcgtgccgccgccgaacatgtccgggccgaacatgtcctacgtggacagcaaccacaaggggcagcgagactttgatatgtcacaagactgtacagacgaagctggcaaaataaaacacaacgacaatcctttcatcgagccctctcaaacacaaaccgtagtagatatgaaagacgtgatggtgttaaacgatatcatcgagcaagctgctggtcggcatagtagagctagtgatcatggagaggacgacgacgaggacggtccaacgttcaaggacaaggccctggagttcacgatgcggatgatcgacgtcttctgcgtgtgggactgctgctgggtgtggctcaagttccaggagtgggttgccttcattgtgttcgacccgttcgtcgagctgttcatcaccctgtgtatcgtggtcaacacgctgttcatggccctggatcaccacgatatggacccggacatggagcgggccctcaagagtggtaactattttttcacggcgaccttcgcgatagaagcaacgatgaagctgattgcgatgagtcccaagtactacttccaagagggctggaacatattcgatttcatcatcgtggcgctgtcgctactcgagctgggtctggaaggtgttcagggattgtcagtattacgttcattccgtttgcttcgagtgttcaagctagcgaaatcgtggccgacgttgaacttactcatttccatcatgggtcgaacgatgggtgcgttaggtaatctgacgtttgtgctctgcattatcatcttcatctttgccgtgatgggaatgcagctgttcggcaagaactacatcgtttctctacatgttggatag

SEQ ID NO: 1811 - DNA, 72 bp, Aedes aegypti
ggggatgtagctcagtggtagagcgctcgcttcgcatgtgagaagtcccgggttcaatccccggcatctcca

SEQ ID NO: 1812 - DNA, 164 bp, Aedes aegypti
atacttacctggcataggggttaccgtgatcacgaaggcggttcccccagggtgaggcccttccattgcactacggttgggttgacccctgcgattatccctcatgtggataactcgtatgcgcaatttttggtagccgggacgtgcgtacgcgcacatcccga

SEQ ID NO: 1813 - DNA, 164 bp, Aedes aegypti
atacttacctggcataggggttaccgtgatcacgaaggcggttcccccagggtgaggcccttccattgcacttcggttgggttgacccctgcgattatccctcatgtggataactcgtatgcgcaatttttggtagccgggacgtgcgtacgcgcacatcccga

SEQ ID NO: 1814 - DNA, 20 bp, Artificial Sequence
  Single strand DNA oligonucleotide
gcgcgctcgttcagtattta

SEQ ID NO: 1815 - DNA, 20 bp, Artificial Sequence
  Single strand DNA oligonucleotide
acacccgttacggcacaata

SEQ ID NO: 1816 - DNA, 20 bp, Artificial Sequence
  Single strand DNA oligonucleotide
tcggcattcgtagcttcgtt

SEQ ID NO: 1817 - DNA, 20 bp, Artificial Sequence
  Single strand DNA oligonucleotide
gcagctgacagtttgccttc

SEQ ID NO: 1818 - DNA, 20 bp, Artificial Sequence
  Single strand DNA oligonucleotide
ccgtttggtatcggcccaag

SEQ ID NO: 1819 - DNA, 18 bp, Artificial Sequence
  Single strand DNA oligonucleotide
gtctttgcgcctcggacg

SEQ ID NO: 1820 - DNA, 19 bp, Artificial Sequence
  Single strand DNA oligonucleotide
ctggagtcggtgagcgaaa

SEQ ID NO: 1821 - DNA, 20 bp, Artificial Sequence
  Single strand DNA oligonucleotide
tacgtatcgtaaacgcgctc

SEQ ID NO: 1822 - DNA, 317 bp, Artificial Sequence
  double stranded RNA
tggaaaagttgacattgacgggatcacgacaactgatttccagcttggccgcatacgttcacaaatgggtctcgtatcgcaagaacctgttctgtttgatcgcaccatcgcggaaaatattgcttatggtgacaacactcgcgagataagcatgccggagataatcgaggcatccaaaatggcaaacattcacgaattcatcgtcaatctaccgaaggggtatgacactagcctaggaaccaaaggagctcaattgtctggtggccaaaagcaacgtattgctatagctcgtgctttggttagaaatccacgaatcc

SEQ ID NO: 1823 - DNA, 373 bp, Artificial Sequence
  double stranded RNA
ccccgtcgacggccacgaagttacgatcaagatcatttacaagcgcaaacagcgaatgagcgagaacattcaattctacaacattctcttccaacgcattatgaaagtcctgaagatggtcgagatgggtcgtaagaactttgacccctcggccccgaaactgattccgcagcatcgtctggagatctggccgggatacgttagcgctgtggacgaatatgagggcggcttgatgttgaatctcgacgtgtcccatcgtgtgctgctccagacgacggttttggatcacatccgaacgctggcaagggccaatccccaagattacaaaaacatggccaccaaatcgctgctgggagccgttatattgacccga

SEQ ID NO: 1824 - DNA, 451 bp, Artificial Sequence
  double stranded RNA
cttcaacgacttcgtccgatcaatttacaacaaatatcctggagtgaaggttttcggaatgttcgagacgatcacgccgttcttcgtgattcgcgatccggagttgatcaagcagatcggcatcaaggatttcgatcacttcgttgaccaccgtccgacgttcggactggacgatgaaacggcggagcatccgaaggcgctgttccgcaagacgctgttctcgatgaccggtcaacggtggaaggagatgcgcgctacgctgagtccggcttttaccggcagtaagatgcgacagatgttctcgctgatgagcgaatgctgcgacgaaatgatgaagcactacctggacaaggcgaagggcacgggaagggtggaagtcgaaatgaaggacttgctgagtcgaatcactatcaatgtgattgcgtcgtgtgcttttggaatcaaggtggac

SEQ ID NO: 1825 - DNA, 422 bp, Artificial Sequence
  double stranded RNA
atcctatacgtcgcgtagctatttatattttagtacatccactgttttcattttttataataacaaccattcttaccaattgtatattgatgatcatgcctagcacgccgaccgtcgaatctaccgaggtgatattcaccggcatctacacgttcgaatcagctgtaaaagtgatggcgcgaggtttcatattacaaccgtttacctatcttagagatgcatggaattggttggacttcgtagtaatagcattagcatatgtaactatgggtatagatttgggtaatctcgctgcattgagaacattcagggtactacgagctctcaaaacagtggccatcgttccaggtctcaagaccatcgtcggcgctgtcatagagtccgttaagaatctcagagatgtgataattttaacaatgttt

SEQ ID NO: 1826 - DNA, 4525 bp, Aedes aegypti
atgacaaacaaagactttcctcaatgcaacggatcgcagccatcggtgaatctcaaaaatggcatcaacaacgacgcgatgtctgtgtccagttacaagggctccaaagacatactgaacgcaaagttcaacaaaccaccggaaaaagctagcaatgcagttaccaacacccaacccgtatcgtacttcaaattgtttcggttcgctacttggggagaaataagtgccacaattctaggagtaatattagcctcgtttgcttctctcggacttccctacggtgttatcctgtacggcgagtacaccactctactggtcgaccgaacaatcgggataggaaaatcgactgacacggccattctgtcgatgtttgggggtggacacgtgttggttaacgccagtgcggaggaaaaccgtctagccatcttgcaggatgccaaagcctttggactgggagtcctctttgtatcggtggtacaattcctcgcagctgcacttagcgtagacatgatcaatcgatccgcaaatcgacaaataagtagaatacggaagttgttcttacgggcagttctacgccaggatatgacctggtacgacctgaacagtgatgataattttgctgtgagaattacagacgatcttgataagttgaaagaagggattggagagaagctttcaattttcacgtatttagtaatgtcgttcactatatctgtgatattttcgttcttctacggatggaaactgacactagtgattttaagttgcgcaccgattataattctagccaccgcaatagttgctaagatgcaaagcacattaactgaaaaagagttgaaggcgtattcttcagctggagcagttgcagaagaagtattgggtagtattcgtactgtagtcgcttttggaggggaacgtaaggagctcgatagatatcgtaaccgtttgagttctgcagagagtaatggtcgtaaaaaaggtctgttttctggtatcggaggaggcataatgtggttcatcatctactgttgctacgcgcttgcattctggtatggaataagcttgattttggaagaccgaggaaaggacgtgaaagattacaccccagcagtactaattattgtattgttcggtgtgttggcaggagctcaaaatctgggtttatcgtctcctcatttggaagccttttccactgcgaaaggttcggcctcatcgattttctcagtcattgataggataccaacgattgattctatgggagacagcggtctaaaacctcattctattgctggaaacattacgttctccggtgtgcactttcgatatccagctagaagtgatgttcaagttctacaaggattgaacttaactattgaagcgggaaaaactgtcgcgttggtcggaccatcaggatgcggaaaatctacatgtcttcaattaattcagaggctgtatgacccattgaatggtaatgttacaatcgatggtacgaagatcaatgacttaaacataacttggcttagatcttttattggagttgtcggccaagaaccagttctgttcgcaactagtatcgcagaaaacattcgctacggaaatccagaagcaacacaaagtgaagtagaaaacgctgccagaatcgcaaattgccacagttttattaccaagcttcctaacggctatcacacactcatcggggagcgtggtgctcaactatcgggaggtcagaaacaacgaattgccatagctcgagcgttagttcgcaatccaaaaatcctcctactagacgaagcgacttccgctctagatccgaattctgaacggcgagttcaggatgcactagaaaaagctagtcgtggccggactacactggttgtgtctcatcgtctatcgactataaccggcgcagataaaatcgtgtatattgagaaaggagtggtcgctgagcagggaacacacgaggaacttatggctaagagaggattgtattacaatttggttcttgccagtggatctcagaaaaaggaagaagatgaagtggaagctatcaaagagataagccaaggaggaccaaaaagtgtatcagcggacgatgatgcgtattcggatgatgaatctgagtcaaacaaatcggccgaagccgtcatggatgacaaagaagacgtatatccggtatctgtgttcagattggtgaaattgaattctcctgaatggccttatattttgtttggttgcggtgcagccatggttgtaggagcatcgtttccgttgtttgctgtgttgtttggagaaatgtatggtattttatctgtagcggatccagagtatgtcaaggaagaatcaaatttttactcgttgctgttcctcgtactcggattagtcactggtctaggaaccttcttccaaacatacctgttcaatatagcaggagtacgattgacatcccgtctgcgacagaaaacctttaaggcaatcatcaatcaggaaatggcatggtttgatgagtctaacaatgctgttggtgcattatgcgctcgtctctcaggcgattgcgctagtgtccagggtgctacaggtactcgtatcggatccttactgcaggctgcgtctaccatatgtatcggtgtaggaatatcgttttactattcatggaatctaacacttgtctcaatagtagccattcctattgtattgggatcgatcatgttagagtcttggtacacggaatccagtggactgaaagagaaacaatctctagaaagtgcaattaaacttgcagttgaagccatttcaaatatccgaaccgttgcaagcttaggtcaagaaccttatgttctggagcgatactataaagaaatagccaaagtggatgaagcttgcaagaagaagagcagattgagaggagtggtgtttgctttaggtcagataatgcctttcatgggatatggcctggcacttttctatggtggtaaacttgtgtccgaagcagaactggaatacaaagatgtcataaaggtatcggaggcattgatttttggagcttggatgcttggacaagccttggcgtatgctccgaacgtaaattcagcaatgctgtctgcaggacgtttaatgaaactactcgatcgtactccaaaaatgcacaacccctcaagttcctacctatcaacttttgagaaccatgaaggtaatatcaaatttacggacgttgaattccggtacccaacgcgaccaacaattccaattctacaaggactgaatcttgatatcaagaaaggaaacacagttgctctagtagggccttcaggttgcggaaaatcgacttgcattcagctgttgctgcgttattatgaccccgacaatggaaaagttgacattgacgggatcacgacaactgatttccagcttggccgcatacgttcacaaatgggtctcgtatcgcaagaacctgttctgtttgatcgcaccatcgcggaaaatattgcttatggtgacaacactcgcgagataagcatgccggagataatcgaggcatccaaaatggcaaacattcacgaattcatcgtcaatctaccgaaggggtatgacactagcctaggaaccaaaggagctcaattgtctggtggccaaaagcaacgtattgctatagctcgtgctttggttagaaatccacgaatcctactgctggacgaagcaacatccgccttggataatcaaagtgaaaaaatcgtccagaatgctttggaccatgctcgcaaaggtcgtacttgcattatcattgcccatcgattaacaactattcaaaatgcggatctaatttgtgtcattcaaagtggagttgttgttgagtgtggaactcatgatgaacttatggcgcaaaacaagatttacgcaaagctttactccatgcaacaagtggcatagaagtgcacttaggctgcgcgctcgttcagtatttattgttactattaaaatagagaagattaatctcgattaaaagatgaaatcagaagacttattgtgccgtaacgggtgtatgttttatgtacatccgatcatgtaaccaatataaacaagagatgagaatatctcagagctagcttcaagcacagatgttatttttatgttagattaagattagttgtgatatttatgaaacgcctctttagtacttagattttacaatatgcgtgtgtaaaaagctttcattttacgacaaaaaatcaaataatgaaacgatacccattttttaaaataatacacaaaatgtttaacgtatgttgaccgcttcttgactaacaaaacacacatcatcatagagcataaattacagagcaatatgtttacaacatacattttaccaaaccatgccaaggaacaaaacgtaagataccagataagaacgcatatatagttactcaatattgatgaatctgcaaagtaaagattttaaagaatttccaccaccttcccactcgctattgctatcactataaatagttatgaaatacatttgtatcaattt

SEQ ID NO: 1827 - DNA, 3964 bp, Aedes aegypti
atagcggatctcactaaccaaaaagcttctccgtcgtgtgttgttttgcgtttcgcttcttttttgacatgcttgcaattcactcgcttttgtaactcgaatctgcttactcgtgtcgcgtagtgctcgtcaaattagattaacaaaaaaacgcgttcgaatttatttaccatacattttagattgattcgcgatttgtgcgcacctgttctgatcgttggtgaagagtgcattcgatatctaccggtaaaaggagtttctaaacgtacgacggaaaaatgtcctcgcggttgaatttagttcgcgcgtttctcagtcagtctggttcatccggagatgccgcggaacgcacgaaggccccatcttccggcgaagcccccagcgaaggggtcgacagtggttttcaaacgcgcaccccggaaagcaccccgaccacacaacgtaaaggaattggacgcggccagttgacctcggatgctggcagagccaccggaacatctggagcggattcatcggaatcggatgacaaacagtccagtattggatctgccatgccgtccttgagcggtcgcggaagggctcagtttattcaggcccttatccgtcaaccgttcgaaccggcgccatcggttgtctccgacgattcgtcctccatggtgtctgcaagggtgtcgcaaattgcctgcggcagaggaagattcatccagcagctgctgaacacggctgcggatgccgagagcatcgaaacacaatcgaacggaaaacatgacgaactctccgaagcggtttcacaggtcaccatcgctgaaacggtcgaaacggtggaaaaagcaccggtcatcaagactggatcgagcggaactcctgtccgactgatgaccaactacattcgtttggcttgtgatccggaccgcggaatctacgaatacgaagtacggttccatcccttggtggactcgaaagcaattagagctcgttacatcgcacaacacaaggatgtccttggcaatgctaaaacgttcgacggcgttaagctgttcctgccaaagaagcttccccaagcggaactcaccctccaatcgaagaaccccgtcgacggccacgaagttacgatcaagatcatttacaagcgcaaacagcgaatgagcgagaacattcaattctacaacattctcttccaacgcattatgaaagtcctgaagatggtcgagatgggtcgtaagaactttgacccctcggccccgaaactgattccgcagcatcgtctggagatctggccgggatacgttagcgctgtggacgaatatgagggcggcttgatgttgaatctcgacgtgtcccatcgtgtgctgctccagacgacggttttggatcacatccgaacgctggcaagggccaatccccaagattacaaaaacatggccaccaaatcgctgctgggagccgttatattgacccgatacaacaacaaaacgtaccgtatcgacgacattctgttcgatcagaatccgaccatgactttcgaagccaacgggcagccaatttcgtacctgcagtattacaaacagcagtacaacatcgacatccacgatctgaagcagccgctgctgattaatcgcaaggagcgtcgtgtatctggccaagacaaaccgatggaaatgatcatgtgcttgatcccggagatttgctaccttaccggattgaccgacgagatgcgaagcgatttcaaggtgatgagagacatcgctgccttcacccgggtatcgccgaatcaacgtttaaacagcatgcgtcaattctgtcgcaacgtgaacgaaaacaaggaagcccgggaaattctggaagtctggggcctaacactggacatgaatgctcttatgatggagggacgttgcttcaaagaggaacaggtgaacttcagtggggtgaatgtgggtgttggaaagagtggagatttcaaccgggccgtcaccagtaacaacgttctgcaagcggtcaacattcgcaactggctcttggtgcacacggcgaaggacaccagaattgccaaatcgtttatggattgcgttgaacgcagctgtcgtcccatgggtattcaaattggaccgccagcaattgaggttctgcaggccgacaaaaccgagctgtacgtacagctgctgcgtacgaaaattcgccaggaaacgcaaatcgttgttataatctgcccaacgtcaagagatgaccgatacgctgctatcaaacgtatttgctgttcggaaatcccagtcccatcgcaggtcatcaacgctcgcactctgagtaacgaggccaaaaaccgagccattgtgcagaagatcatcctccagatgaactgcaaactgggtggaacgctgtggagcattcgtatcccgttcgacaacgtgatgatcgccggcatcgatacctatcacgatccgaagcagaagagcaactccgtttcggcattcgtagcttcgttgaatggtgactacaccagatggtattcacgtgcttgcattcagagcaagaaggaggagttcatcaacggattgtgtgcatcgatggagaagtctttgaaggcttaccagaaggcaaactgtcagctgccgaagaagattatcattttcagagatggcgttggagacggtcagctgcgaatgtgctccgagtacgaaattccacaactgcaggagtcgtgtaagctagtggaaccggattacaatccggagataacattcattgtcgtccagaagcgtatcaacacccgtatgttccgtatcgacggtaacaacttggaaaacccgaaccctggcaccgttctggatcacaccatcacccgacgcaaccacttcgattacttcctggtgccgcagtcggtccggcagggcagcgtctcgcccactcactacattgtggtccacaaccagtcgaaccactcgccggacatcctgcaacggttgagctacaaactgtgctatctgtactacaactggcccggaagtgttcgagttcctgcttgctgtcagtacgcccacaaaatggcctatctcattggacagtcggtgaaacggaatccggacgaggcgctgaacgacaaactgttctacctgtgaatggcgtcatcggtttaccgccagctgggagttttgttttatccaaagggactgagttgttttcgatttatgttttcttctcgaaatgagatgtgttttatcaagtttctatagagagagagatacctaaaatgagtgccttgttaatcagcgacatgattttcccgctgagataacctataaaatgtttttgttacaacatattcggtaactaaagactgaattccatctatttttgagttacctcatcaatgacgcgttttgagtgaactagaagagaaaaatctaacgtctttgagctcctcgctcgccctggttttcaatttcaggcactcgatacattttaaaacatttcaacacatctgaacacgccaaatacgtcgttggctgtttgtaccagagtcgtacaaattacattctccacaatatgttaacttctaacgttggactgagcaatgataacgttctactaacctacatttattagaatgaaataacagttagtgcataatcaaggaagtttttcgttatttttttataaactccaatcctatcggaaggtacctacaggatttaagtgcccatccgatggatcgttagggagaaatctcatattttatctaataaaataaacataaattcataaatatgaacctgtattcattaattatccgaaactcgaaaacagttaaactattgtaaatcctcgcaaactatctcaaacatcttattggtagcgctatattacgttttaggtgcaccaaggtggtgagaccgtcacaaacaattttcatcttgctccgcctacccctaacacttatcgacatatgtttaaccttcgggctgtcgcg

SEQ ID NO: 1828 - DNA, 1565 bp, Aedes aegypti
ggagtactggtggcgattgtcgccttcctgtaccgctggataacgcgcaacaatgactacttccacgacaaaccgatcccgtcgatggccgttacgccattcctgggtgcttcgggacctctcctgctgcgaaaggtcaccttcaacgacttcgtccgatcaatttacaacaaatatcctggagtgaaggttttcggaatgttcgagacgatcacgccgttcttcgtgattcgcgatccggagttgatcaagcagatcggcatcaaggatttcgatcacttcgttgaccaccgtccgacgttcggactggacgatgaaacggcggagcatccgaaggcgctgttccgcaagacgctgttctcgatgaccggtcaacggtggaaggagatgcgcgctacgctgagtccggcttttaccggcagtaagatgcgacagatgttctcgctgatgagcgaatgctgcgacgaaatgatgaagcactacctggacaaggcgaagggcacgggaagggtggaagtcgaaatgaaggacttgctgagtcgaatcactatcaatgtgattgcgtcgtgtgcttttggaatcaaggtggactgcttcaaagagcaggaacatgagttcttgtatcacggcaggaagatgatgggttttggtcggccgattgtgattgcgaggatgttggctatgcgagtctttccgaagtttgctgcgaagttcggaatcgacttactcgatcgcgaacaggcggactacttcacacatgttttccaagagacgattagggctcgtgaaagccatggatacattcggcatgacatgatcgacctgttgctgcaggctcgcaagggtacgctgaagtatcaggaagagaaggatgaccaggaagggttcgccaccgttcaggagtcagatgtaggcaaagcagacgtgtcgaagagtatgaccgaagcagagatgatcgcacagtgcttgatattcttccttggtggattcgacactgtgtctacctgtgccatgttcactgcctacgagttggtccgcaatccggaagttcaacacaagctgtacgaagagattaagcagacagaaaaggagttggaaggaaagccgctgagctacgatgcacttcagaagatgaagtacatggatatggtagtgtcggaaacactgagaatgtggcccttggctccggctacggatcgtctctgcacccaagactacaccattgatgacggccagggcgtgagattcacgatcgacaagggaacgtgcgtttggttcccggcagctggactgcaccacgatccacagtatttccccaatccggagaagttcgatccggagcggttcaatgacgaaaacaagcggaacatcaacctgggagcgtatctgccgtttggtatcggcccaaggaactgcatcggatcgcggtttgcgctgatggaggtcaaggccgtcatgtatttcattctgctcaagttttcgttcgtccgaggcgcaaagacccagataccgatgcagctacggaagggatttaccaatctgggtccggagaatggaatgcacgt

SEQ ID NO: 1829 - DNA, 541 bp, Aedes aegypti
gatcagtttcgagttgtccacttgaagttctgttgaaaaaccaaaccaccctccaaaatgtctctgaagtccgacgaagttttcgccaagatcgctaagcgtctggagagcatcgaccccgccaaccgtcaggtcgagcacgtgtacaagttcagaatcacccagggtggcaaggttgtcaagaactgggttatggatctgaagaacgtcaagctggtcgagtccgacgatgccgccgaggccaccctgaccatggaggatgacatcatgttcgccatcggaaccggtgccctgcccgccaaggaagccatggcccaggacaagatggaagtcgatggacaagttgagctgatcttcctgctggagccattcattgcctcgctgaagtaaaatgcgtgacgcggcccttgtgaataccaatcattgcatgtgcttgcctcgtttaatcagagcgaatgtcatgtcatccaaactactgtgttgtaacttattattttcctgtatcgcgatttcggcatcattaaaacgtattttgtaaagt

SEQ ID NO: 1830 - DNA, 1787 bp, Aedes aegypti
cacaatcggattttgacgctcgctctggtacagttcgatacggtctagtgaaaccgaggataacgacgaaggtttttccccattgatccaggacctaacggaccttgaagcggcgccaaaatgtgtgacgatgatgctggagcactagtcattgacaacggatccggcatgtgtaaggccggtttcgctggtgatgatgccccacgtgccgtcttcccgtccattgtcggccgccctcgccaccagggtgtgatggtcggtatgggtcaaaaagatgcctacgtcggtgatgaagcccaatcgaagcgaggtatcctcaccctgaaatatcccatagagcacggtatcatcaccaactgggatgatatggagaagatttggcatcacaccttctacaacgagttgcgagtagctcctgaagaacatccagtattgctgactgaggctcccttgaatccaaagtccaatcgcgagaagatgactcagatcatgtttgaaacattcgcttcgccagctgtgtatgttgccatccaagctgttctgtccctgtacgcctccggtcgtactactggtattgttctggattccggagatggtgtctcccataccgtcccaatctacgaaggttatgctctgccacatgccatcctccgtatggatttggctggtcgtgatctgaccgattacctgatgaagatcttgaccgaacgtggatactctttcaccaccaccgctgaacgtgaaatcgttcgtgacatcaaggagaagctgtgctacgtcgctctggacttcgagcaggaaatgcaagccgctgccgctacgtcttcatccgagaagtcttatgaacttcccgatggccaagtcatcacaatcggcaacgaacgtttccgtgctccagaagcccttttccagccatccttcctgggaatggaatcaactggcattcatgaaacggtctacaactcgatcatgcgttgcgatgtcgacatccgcaaggatctctatgctaacagcgtcttgtctggtggtaccaccatgtacccaggtattgctgatcgtatgcagaaggaaatcacttccctggctccatccaccatcaagatcaagatcattgccccaccggaacgtaaatactccgtctggatcggtggatccatcctggcctcgctgtctaccttccaagctatgtggatctccaagcaggaatacgacgaaggtggcccaggaattgtccaccgcaagtgcttctaagccgatcccgattgtactgattaccataagcgacattgccagtgaaagcgacaacagcagcatcaaagtacatttgtcatactgattcggctactaccaccatccggaatcagcttgcatcgaacatcaaatcacgttattcaatgtatctgtcatccagctcagacaagtcggagcttttccagtcgcgaaaatctgcgactccagcggaaagcaccgaaccacagagaggactcgtatgaaagccagggaagaaaccatcattcaccttgcagcaaataggaaaaaaaaacggacatcttcaacaaacaaaagcccatgcgctaacttggtttaggagtttagtgtgacaccatgaccccgctgatgatctttacttagcacaccataaccacctttatgcgttcgttcatccaaaaactacaggatatcactgcagccgcgagaagaactcgtgaaccatcctgttttcttttttattatattcttacttttaacttcaaattattttcagtaataaaacgtctcaaaataat

SEQ ID NO: 1831 - DNA, 1245 bp, Aedes aegypti
atggcaatacatcgtgttctgccatcgctctccgcgtttctttgcgttctgggtttcgtatggtcgagccagtatgatggttacaaactgtacgaagtgcccatctccactggccacgaagtccagcttctgctatatcttcagcaccaccgtcccagtatcgatgtttgggccctgaacaagctcggtcccaagcgggtgcttgtgccgccgatcttgcagaaaactgttgagtccttcttcaaggactatcgcatcaactacaccgtcaaggtggaagatttcggaaaaaactattcggctagacaaacgccaacgatgcagctggaggatccaacgtttatgaacagttatccgacgtatgacgagatcaacgactatttagttcaaattgcgacggagaacttcgagtggattcgattccggatcattggttggtctgtggaaggtcgcccgattcgagcaatcacgatcaatcctgataagcagagaacaatcattgtggacgcagggattcacgctcgagagtggatcaccgtatcaactgcactatacttgatcaaaaagctaatcgaagacggtgatcagtaccggattctacacgagtacaaatgggtgatcgtacctctggtgaatcccgatggatacatttactcgacggaaactgatcgctattggagaaagaaccgaagacgattgagtgacaagtgcgttggagtggatctgaatcggaatttcggatttaggtgggacgtgggagtaaatttgttctctggtgaatgccatcctgggttccgaggctacgctccattttccgaaccggaaaccagagctctaagaacagtgatcgacaataatccggatgccgatctgtatataaacttgcacagtttcgggggctatttgatctatccttggagctacgatagtgctgcggtggaaaatgtggaagacttgcggaaggtcggagtttcggcagcaagggccatgtggcattacggtcatcacgagtacaaggttgggtcgagttcggaaatattgcgctatcaggccagtggaaccagcatcgactacgcgtactcggttggcatagacttcccgtttgcgatggagatcgccgaatacggatacagtgacttccagcctccaacgaatgctatcgctcagattgttaaggagtcatttgtcggaataaaagaaatggtgtatgcagttcggaagctgaaagcggaaaccaaagaataa

SEQ ID NO: 1832 - DNA, 354 bp, Aedes aegypti
atgctgtccaccagtatgagctcgagacagattctgctcggcctggccctgttgctgtgtgtagtcaaattgaccaccggacgaccacaaaacgcaatcgacaaccaggatgcccccgagataaacctaaacgagctgcgaaagctgtactccaactacaacccgtacgtgtcgaactcactggatgactatggactggatcggttacagctgcaactgctggctcagtacgcccaaagcaatgccatcggaggagctggcggttgggaccagctgtaccgcgccccggagatgaaacgccagattcggtaccgtcagtgttacttcaacccgatttcctgcttcaagaagtaa

SEQ ID NO: 1833 - DNA, 20 bp, Artificial Sequence
  Single strand DNA oligonucleotide
tcggcattcgtagcttcgtt

SEQ ID NO: 1834 - DNA, 20 bp, Artificial Sequence
  Single strand DNA oligonucleotide
gcagctgacagtttgccttc

SEQ ID NO: 1835 - DNA, 20 bp, Artificial Sequence
  Single strand DNA oligonucleotide
cagaatcccagacccggaac

SEQ ID NO: 1836 - DNA, 20 bp, Artificial Sequence
  Single strand DNA oligonucleotide
ttggcgaaaccgtaccttga

SEQ ID NO: 1837 - DNA, 20 bp, Artificial Sequence
  Single strand DNA oligonucleotide
taagcgtctggagagcatcg

SEQ ID NO: 1838 - DNA, 20 bp, Artificial Sequence
  Single strand DNA oligonucleotide
ctcgaccagctgacgttctt

SEQ ID NO: 1839 - DNA, 20 bp, Artificial Sequence
  Single strand DNA oligonucleotide
gtttcgctggtgatgatgcc

SEQ ID NO: 1840 - DNA, 20 bp, Artificial Sequence
  Single strand DNA oligonucleotide
ggtgaggatacctcgcttcg

SEQ ID NO: 1841 - DNA, 21 bp, Artificial Sequence
  Single strand DNA oligonucleotide
cgtcaaggtggaagatttcgg

SEQ ID NO: 1842 - DNA, 20 bp, Artificial Sequence
  Single strand DNA oligonucleotide
cggcatccggattattgtcg

SEQ ID NO: 1843 - DNA, 20 bp, Artificial Sequence
  Single strand DNA oligonucleotide
tgctgtccaccagtatgagc

SEQ ID NO: 1844 - DNA, 20 bp, Artificial Sequence
  Single strand DNA oligonucleotide
tcctccgatggcattgcttt

SEQ ID NO: 1845 - DNA, 20 bp, Artificial Sequence
  Single strand DNA oligonucleotide
gcgcatgaagaagaagctgg

SEQ ID NO: 1846 - DNA, 20 bp, Artificial Sequence
  Single strand DNA oligonucleotide
tttgtgcctctgcatttgcc

SEQ ID NO: 1847 - DNA, 20 bp, Artificial Sequence
  Single strand DNA oligonucleotide
gcctaccaagctccgcaaat

SEQ ID NO: 1848 - DNA, 20 bp, Artificial Sequence
  Single strand DNA oligonucleotide
gacgatgtcctgctgttcgt

SEQ ID NO: 1849 - DNA, 21 bp, Artificial Sequence
  Single strand DNA oligonucleotide
tgtggacgctaaggaacagcc

SEQ ID NO: 1850 - DNA, 19 bp, Artificial Sequence
  Single strand DNA oligonucleotide
catcgagccccaagcatcc

SEQ ID NO: 1851 - DNA, 20 bp, Artificial Sequence
  Single strand DNA oligonucleotide
gaagatcaatgcaccaccgc

SEQ ID NO: 1852 - DNA, 20 bp, Artificial Sequence
  Single strand DNA oligonucleotide
ggacgcgatctacgaggttt

SEQ ID NO: 1853 - DNA, 20 bp, Artificial Sequence
  Single strand DNA oligonucleotide
taccggacaccgtcaagaag

SEQ ID NO: 1854 - DNA, 24 bp, Artificial Sequence
  Single strand DNA oligonucleotide
ctaaatatcgataccctcctgctg

SEQ ID NO: 1855 - DNA, 20 bp, Artificial Sequence
  Single strand DNA oligonucleotide
actcggaagcagtggtaacg

SEQ ID NO: 1856 - DNA, 20 bp, Artificial Sequence
  Single strand DNA oligonucleotide
atctgcattccttccggctt

SEQ ID NO: 1857 - DNA, 373 bp, Artificial Sequence; identical to SEQ ID NO: 1823
  double stranded RNA

SEQ ID NO: 1858 - DNA, 431 bp, Artificial Sequence
  double stranded RNA
tcttctccaccacagccaatggcgtacaggctggagaacaggcagattggacggcccatttccgtaacaatcccatgttcgctacggtgcggttgacgcgatggtatttgatcgtaccgaaccgggcttcacgtgaggccaacgatttcctgggctgcatgattcaagccgcacgcggtatgcgatttgagattagtaactgtgaggtggtcaccattccggacgacaacccaggtacctatgtgcgaacattggacaatctgctgaataaggacccgcagttggtgatgtgcgtcgtgaccaacaataaggccgatcggtacaccgccatcaagaagaaatgttgcgttgatcgtgccatcccaacgcaagtcatggtacaaaaaacgatcacaccaaagggtggtaatgtacgaacactcatgtccgtg

SEQ ID NO: 1859 - DNA, 223 bp, Artificial Sequence
  double stranded RNA
gacaagatggaagtcgatggacaagttgagctgatcttcctgctggagccattcattgcctcgctgaagtaaaatgcgtgacgcggcccttgtgaataccaatcattgcatgtgcttgcctcgtttaatcagagcgaatgtcatgtcatccaaactactgtgttgtaacttattattttcctgtatcgcgatttcggcatcattaaaacgtattttgtaaagt

SEQ ID NO: 1860 - DNA, 508 bp, Artificial Sequence
  double stranded RNA
cgacgaaggtggcccaggaattgtccaccgcaagtgcttctaagccgatcccgattgtactgattaccataagcgacattgccagtgaaagcgacaacagcagcatcaaagtacatttgtcatactgattcggctactaccaccatccggaatcagcttgcatcgaacatcaaatcacgttattcaatgtatctgtcatccagctcagacaagtcggagcttttccagtcgcgaaaatctgcgactccagcggaaagcaccgaaccacagagaggactcgtatgaaagccagggaagaaaccatcattcaccttgcagcaaataggaaaaaaaaacggacatcttcaacaaacaaaagcccatgcgctaacttggtttaggagtttagtgtgacaccatgaccccgctgatgatctttacttagcacaccataaccacctttatgcgttcgttcatccaaaaactacaggatatcactgcagccgcgagaagaactcgtgaaccatcc

SEQ ID NO: 1861 - DNA, 602 bp, Artificial Sequence
  double stranded RNA
cgtcaaggtggaagatttcggaaaaaactattcggctagacaaacgccaacgatgcagctggaggatccaacgtttatgaacagttatccgacgtatgacgagatcaacgactatttagttcaaattgcgacggagaacttcgagtggattcgattccggatcattggttggtctgtggaaggtcgcccgattcgagcaatcacgatcaatcctgataagcagagaacaatcattgtggacgcagggattcacgctcgagagtggatcaccgtatcaactgcactatacttgatcaaaaagctaatcgaagacggtgatcagtaccggattctacacgagtacaaatgggtgatcgtacctctggtgaatcccgatggatacatttactcgacggaaactgatcgctattggagaaagaaccgaagacgattgagtgacaagtgcgttggagtggatctgaatcggaatttcggatttaggtgggacgtgggagtaaatttgttctctggtgaatgccatcctgggttccgaggctacgctccattttccgaaccggaaaccagagctctaagaacagtgatcgacaataatccggatgccg

SEQ ID NO: 1862 - DNA, 254 bp, Artificial Sequence
  double stranded RNA
tgctgtccaccagtatgagctcgagacagattctgctcggcctggccctgttgctgtgtgtagtcaaattgaccaccggacgaccacaaaacgcaatcgacaaccaggatgcccccgagataaacctaaacgagctgcgaaagctgtactccaactacaacccgtacgtgtcgaactcactggatgactatggactggatcggttacagctgcaactgctggctcagtacgcccaaagcaatgccatcggagga

SEQ ID NO: 1863 - DNA, 251 bp, Artificial Sequence
  double stranded RNA
caatgagcttgaaattgctttggaccatgcaaataaggcaaatgcagaggcacaaaagaacattaaacgttatcaacaacaactgaaggatctccagggtgcccttgaagaggaacagagggcacgcgatgatgctcgagaacaactcggaatctctgagcgccgagcaaatgcactgcaaaacgagctggaagaatctcgaacattacttgagcaggctgaccgaggccgtcgccaagctgaacaggaac

SEQ ID NO: 1864 - DNA, 700 bp, Artificial Sequence
  double stranded RNA
tccaggtagccccggcccaaaagcactacaagatcatcttcattaaggccccgtccgccccagcctaccaagctccgcaaatccccctgcagccccagaacgaagagaagaccctggtctacgtgttggtcaagaagcccgacgaacagcaggacatcgtcatcccgacgccagcccccacccagcccagcaaacccgaggtctacttcatcaagtacaagacccagaaggagggcggagccggaggattcgccggaagcgttggcggaagcttcggtgccgatattggtggctctattggcggtcatgatagcggctccggagatcacagcggaggacacaccgccacggccccagctgcccagtacggaccacccggcaagtccggcccatactaagacacgaaccaccaccacgaacacgaacggatcattccggactcatcgaaccgattccgcggaccacgtagctagtcgaaaaaacacaaatcattgaaacacattaacacacacatccaagcggagtcagtctagctcacgcacaaacaccaacacaaatcacgttgttattgttgaacgctcttttgccggaggaggttccggttcgtccggcgtccaggaattgcaaggagccgtcgaatcggaacgccccaggcctctgttgtacataggatttctacttcacgaagcgaagaaaacaa

SEQ ID NO: 1865 - DNA, 187 bp, Artificial Sequence
  double stranded RNA
tgtcgtggttgaggacaagccagccgctgctgatgccaagcctgattccgctcgggatgcttggggctcgatgatcgatggaattatcggtcagctgcaggatctgaagaggaaaacccgtgccctggaagaccttgcccacagaaagtgaacgctgttcggctcactgtgatttgaagagtttgga

SEQ ID NO: 1866 - DNA, 700 bp, Artificial Sequence
  double stranded RNA
gctcgctccaaaaccattgtgtgggatcagcaaaacaatatcgtgttgtcgaataagagatagctgtatatcactattgtagtgattgtctagcgtcttggtgtttttttttgtgtcgcaagattgtaaaatccgttagatttgtaaagaataatctaattttccaaatatttgtttttttatttgattaattttcgtttagttgttgttttaggtttgtgagtgatttgtcgtattagatagttcaacatgctttcaggagatcgcctctccgacaattgtcacagagcaaatccttatatcgagcagcgtgcatccacaggctttgatatggatccattgggagacaattcgccactatggggagccacccaattgaactaccccgaattcgcccgccaatcgcaatggcccgacagcagtgatcctcaccaccagcatgttatgcaatccgatggatacaactcatatccagttgcaccgatagagggcagctacatcgagctacgaacatccccggaaatcgtcgaagccgattctaccattgcggaaaatggtggagtcatctaccatgattatcagcaactaccggcaggaccatcagcggcggacatgtttccggttcctactgaaatcggatcctatccaccggcggaagaaggaggttctagcaaaaacatgtcaccagacggaggctact

SEQ ID NO: 1867 - DNA, 167 bp, Artificial Sequence
  double stranded RNA
atctactgcgtctccgattgaacgcttgcggatggagcgaccaggtgcgattgctgtgccgggaagccatcaaggaacaggattccatcaactgtgacgccctggtgcagcaagtgacgccaaaggcccgtgccctcataccggacaccgtcaagaaggaattgctc

SEQ ID NO: 1868 - DNA, 362 bp, Artificial Sequence
  double stranded RNA
accagcgacgaggaagtgaaaacgttcttcgaacagtttggaaacgtagtggagatggagatgcccttcgataagatgaagaaccaacggaagggcttctgcttcattacgtacgactcggaagcagtggtaacggaactcttgaagacgcctaagcagaccgtgggaggcaaggaagtcgacgtgaagcgagcaacacccaagccggaaggaatgcagatgggtggccgtggaccgatgcgaggatcgccgcgtggcatgcgtggaggtcgaggcggattcggcggaatgagaacctacggacaaggctggggcggcggacaaggattcggcgggggatacaaccaaggcggtttcggagg
